(19) United States
(12) Patent Application Publication
(10) Pub. No.: US 2011/0136137 A1
(43) Pub. Date: Jun. 9, 2011

(54) SERUM PROTEOMIC FOR FINDING DIAGNOSTIC MARKERS AND FOR MONITORING THERAPEUTICAL INTERVENTION IN TREATMENT OF HEPATOCELLULAR CARCINOMA

(76) Inventors: Jurgen Borlak, Lehrte OT Immensen (DE); Guiseppe Gazzana, Hannover (DE)

(21) Appl. No.: 12/744,977

(22) PCT Filed: Dec. 11, 2008
(86) PCT No.: PCT/EP08/10824

§ 371 Date: Dec. 20, 2010

(30) Foreign Application Priority Data
Dec. 13, 2007 (EP) 07076092.1

(51) Int. Cl. G01N 33/573; C12N 9/26; C07K 14/775; C12N 9/18; C07K 14/47; C07K 14/75; C12N 9/08; C12Q 1/40; C12Q 1/44; C12Q 1/28; G01N 33/68; G01N 33/92; C12Q 1/37

(52) U.S. Cl. 435/7.4; 435/201; 530/359; 435/197; 530/395; 530/382; 435/192; 530/386; 530/380; 530/350; 530/396; 435/22; 435/19; 435/28; 436/86; 436/87; 436/71; 436/501; 435/23

(57) ABSTRACT

The invention is directed to biomarkers for determining the EGFR kinase activity in a subject, and the use thereof for predicting and monitoring therapeutic intervention in cancer patients. Areas of application are the life sciences: biology, biochemistry, biotechnology, medicine and medical technology.

The biomarkers are selected from a first group consisting of Amy 1, Apo Al, Carbx, Casp, AFP, ApoM, SAP, Fib-a, Fib-b, Fib-g, ApoE, A2MG, A2MG isoform, Serpin, Clusterin, MHC-fB, SAP isoform, or from a second group consisting of Gpx3, properidin, MUP1, HMW-K, Lifr-p, Orm 1, MBL-A, MBP-C, wherein the biomarkers are regulated by EGF overexpression in a subject.

### CROSS-REFERENCE TO RELATED APPLICATIONS

[0001] This application is the United States National Phase under 35 U.S.C. §371 of PCT International Application No. PCT/EP2008/010824, filed on Dec. 11, 2008, and claiming priority to European Application No. 07076092.1, filed on Dec. 13, 2007. Those applications are incorporated by reference herein.

### INCORPORATION BY REFERENCE OF ELECTRONICALLY-SUBMITTED SEQUENCE LISTING

[0002] This application is accompanied by a sequence listing file submitted in electronic format and incorporated by reference herein. That sequence listing file was created on Dec. 19, 2010, is named 12744977sequence.txt, and has a file size of 770,748 bytes (753 KB).

### BACKGROUND OF THE INVENTION

[0003] 1. Field of the Invention

[0004] The invention is directed to biomarkers for determining the EGFR kinase activity in a subject, and the use thereof for predicting and monitoring therapeutic intervention in cancer patients. Areas of application are the life sciences: biology, biochemistry, biotechnology, medicine and medical technology.

[0005] 2. Background of the Related Art

[0006] The epidermal growth factor receptor (EGFR) plays an important role in various tumor diseases. Its hyperactivity can cause cancer of numerous organs, e.g. epithelial tumors of the lung, colon, breast, head and neck, ovarian, and liver (HCC). The hepatocellular carcinoma (HCC), for instance, ranks fifth among the most common malignant tumors worldwide and is the third leading cause of cancer-related deaths. Thereby, the number of HCC diseases in Europe and the United States steadily increases, as exemplarily demonstrated in the north east of Germany, where the number of HCC-incidences of males arose from 3.6% in 1976 to 5.7% in 2002. Chronic liver disease, which lead to cirrhosis and infection with hepatitis C are important risk factors for HCC. Overall, the formation of HCC is a multistage process, whereby the latest findings from cancer research evaluate the dysregulation of tumor progenitor genes as a predisposing or initial event leading to an epigenetic modification of progenitor or stem cells. Then, the risk of malignant transformation becomes dramatically increased by mutations in such tumor suppressor- and proto-oncogenes. Finally, the malignant transformation and the invasive tumor growth is massively promoted by epigenetic instability. Despite numerous findings the molecular basis of hepatocellular carcinoma remains insufficiently known.

[0007] Recently, the consequences of excessive EGF-signal transmission in liver cancer has been reported. This growth factor binds to and induces EGFR activity. Activated EGFR phosphorylates many proteins which are networked by signal transduction chains and therefore favour the emergence and further development of tumor malignancies. In particular, various tyrosine residues are phosphorylated, which subsequently act as docking sites for a number of proteins. In this way, EGFR is involved in diverse signaling pathways, including the mitogen-activated protein kinases (MAPK). This in turn has implications for the fate of the cell, leading to exaggerated proliferation, the lack of differentiation and migration of transformed tumor cells.

[0008] Since the EGF-receptor tyrosine kinase (RTK) plays a key role in malignant tumor diseases, therapeutic antibodies and small molecules, also termed as “EGFR kinase modulators”, that counter an increased activity of EGFR are frequently used for the treatment of cancer. However, besides to the EGF-signalling cascade further signalling pathways are involved in the formation and growth of cancer such as, e.g., Wnt-β-Catenin, Hedgehog and other receptor tyrosine kinases.

[0009] Thus, there is a need for new prognostic and predictive biomarkers and methods for easily identifying the indication “EGFR hyperactivity” or “EGFR overexpression”, respectively, in a subject suffering from or being susceptible to cancer, for accurately predicting and monitoring the response of the subject to a treatment with EGFR modulators, thereby enabling an individualized cancer treatment of the subject for enhancing its chances of survival.

### BRIEF SUMMARY OF THE INVENTION

[0010] The aim of the present invention is therefore to provide biomarkers, compositions and a kit, as well as a method for a fast, easy and efficient qualification or quantification of the EGFR kinase activity status of a subject suffering from or being susceptible to cancer, in particular for predicting and monitoring the response of a cancer patient to the treatment with an EGFR activity modulator.

[0011] The invention is based on the surprising finding that biomarkers selected from a first group consisting of

Amy 1, Apo Al, Carbx, Casp, AFP, ApoM, SAP, Fib-a, Fib-b, Fib-g, ApoE, A2MG, A2MG isoform, Serpin, Clusterin, MHC-fB, SAP isoform,
or from a second group consisting of
Gpx3, properidin, MUP1, HMW-K, Lifr-p, Orm 1, MBL-A, MBP-C,
are regulated by EGF overexpression in subjects suffering from or being susceptible to cancer.

[0012] The biomarkers according to the invention concern gene products of mammalia, preferably gene products of the genome of mus musculus or homo sapiens, in particular the respective gene products of homo sapiens are preferred.

[0013] Within the context of the invention, the term “subject” is directed to a mammal, in particular to a mouse or a human being suffering from or being susceptible to cancer, more particular to a human cancer patient or a transgenic cancer mouse, such as a HCC patient or a EGF-transgenic mouse may be.

[0014] The invention further concerns a composition for qualifying the EGFR kinase activity in a subject suffering from or being susceptible to cancer, in particular by an in vitro body fluid analysis, wherein the composition comprises an effective amount of at least one biomarker selected from the first group of said biomarkers or an effective amount of at least one biomarker selected from the second group of said biomarkers.

[0015] In one embodiment of the invention, the biomarker is preferably selected from a first group consisting of

[0016] Amy 1, Apo Al, Carbx, Casp, Fib-a, Fib-b, Fib-g, Clusterin, MHC-fB, SAP isoform

or from a second group consisting of

### HMW-K, Lifr-p, Orm 1, MBL-A, MBP-C.

[0017] In another preferred embodiment, the biomarker is selected from a first group consisting of

### AFP, ApoE, ApoM,

[0018] or from a second group consisting of
Gpx3, A2MG, A2MG isoform, SAP.

[0019] In particular, it is preferred, if the composition according to the invention comprises an effective amount of at least one biomarker selected from the first group of said biomarkers and an effective amount of at least one biomarker selected from the second group of said biomarkers, wherein the combination
[0020] (a) biomarker selected from the group consisting of Amy 1, Apo Al, Carbx, Casp, Fib-a, Fib-b, Fib-g, Clusterin, MHC-fB, SAP isoform and biomarker selected from the group consisting of HMW-K, Lifr-p, Orm 1, MBL-A, MBP-C or the combination
[0021] (b) biomarker selected from the group consisting of AFP, ApoE, ApoM and biomarker selected from the group consisting of Gpx3, A2MG, A2MG isoform, SAP
   is particularly preferred.

[0022] In another preferred embodiment the composition further comprises an effective amount of a biomarker selected from the group of EGF, thus allowing an easy calibration of the system.

[0023] In yet another preferred embodiment, the composition according to the invention further comprises an effective amount of a protease, in particular of trypsin, thus enabling a further enhancement of the system sensitivity.

[0024] The composition according to the invention, in particular the protease digest thereof, may be preferably used for producing a vaccine for the immunization of an animal in order to produce polyclonal antibodies specific for the at least one biomarker.

[0025] Another aspect of the invention concerns the use of the composition according to the invention for the production of a diagnostic agent, in particular of a diagnostic standard for in vitro body fluid analyses.

### BRIEF DESCRIPTION OF THE FIGURES

[0026] FIG. 1. A: Western blot representing the overexpression of EGF in livers of transgenic mouse model of HCC. (T=tumor samples; C=control samples). B: Histopathology of advanced liver cancer. C: Histopathology of control liver.

[0027] FIG. 2. A: Example for a map of the mouse serum proteome. (pH 3-10 NL; stain: coomassie blue; loaded sample: 500 μg); B, C: Zoom in for control and tumour serum samples, respectively. Immunoglobulins (circle) and glutathione peroxidase 3 (small rectangle) are down regulated in HCC-mice sera (right side of the panel). Two spots of serum amyloid component P (big rectangle) are up regulated (right side of the panel).

[0028] FIG. 3. ppm values of the 25 regulated proteins. A: down regulated proteins; C, E: up regulated proteins; B, D, F: proteins virtually present only in tumor samples; G: proteins virtually present only in control samples.

[0029] FIG. 4. Western blots of fibrinogen gamma (A), apoM (B), alfafetoprotein (C) and serum amyloid component P (D). All these proteins were up-regulated in serum samples of tumor bearing mice. (C=control, T=tumor).

### DETAILED DESCRIPTION OF THE INVENTION

[0030] The term “body fluid” according to the invention is directed to any body fluid of a subject, in particular to blood, plasma, serum or urine, whereas serum is the preferred body fluid within the context of the invention.

[0031] The term “diagnostic agent” as used herein relates to any solution, suspension or solid formulation, containing said composition in an acceptable amount for diagnostic purposes.

[0032] In particular, the composition is used for the production of a diagnostic agent for qualifying the EGFR kinase activity in a subject suffering from or being susceptible to cancer, preferably cancer of the liver, lung, breast, colon, prostate, bladder, head and neck, ovary or brain, in particular in a subject suffering from or being susceptible to HCC.

[0033] In a further preferred embodiment, the composition according to the invention is used for the production of a diagnostic agent for predicting or monitoring the response of a cancer patient to a method of treating cancer comprising administering an EGFR kinase modulator to the patient.

[0034] In yet another aspect, the invention provides a kit for qualifying the EGFR kinase activity in a subject suffering from or being susceptible to cancer, in particular for predicting or monitoring the response of a cancer patient to a method of treating cancer comprising administering an EGFR kinase modulator, wherein the kit comprises at least one standard (1) indicative of the body fluid level of a biomarker selected from the first group of said biomarkers in normal individuals or individuals having cancer associated with increased EGFR kinase activity and/or at least one standard (2) indicative of the body fluid level of a biomarker selected from the second group of said biomarkers in normal individuals or individuals having cancer associated with increased EGFR kinase activity, and instructions for the use of the kit.

[0035] In a preferred embodiment of the kit, the standard (1) comprises an indicative amount of at least one biomarker selected from the first group of said biomarkers and/or the at least one standard (2) comprises an indicative amount of at least one biomarker selected from the second group of said biomarkers.

[0036] In another preferred embodiment, the kit comprises a mixture of the at least one standard (1) and the at least one standard (2), in particular a composition according to the invention comprising an effective amount of at least one FIG. 3 from the first group of said biomarkers and an effective amount of at least one biomarker selected from the second group of said biomarkers, wherein the set of biomarkers according to combination (a) or combination (b), as described herein, is particularly preferred.

[0037] In yet another preferred embodiment, the kit according to the invention further comprises a lysis buffer, wherein the lysis buffer comprises (a) at least one buffer component, (b) at least one chaotrope, (c) at least one detergens, (d) at least one reducing agent (e) at least one carrier ampholyte, and (f) at least one ribonuclease,

[0038] Preferably, the lysis buffer is an aqueous solution of (a) at least one buffer compound selected from the group consisting of Tris and HEPES, (b) at least one chaotrope selected from the group consisting of urea and thiourea, (c) at least one detergens selected from the group consisting of CHAPS and SDS, (d) at least one reducing agent selected from the group consisting of DTT and TCEP, (e) at least one carrier ampholyte selected from the group consisting of biolyte 5-7 and biolyte 3-10, and (f) at least one ribonuclease selected from the group consisting of endonuclease and exonuclease, wherein an aqueous solution of (a) Tris; (b) urea and thiourea, (c) CHAPS, (d) DTT, (e) biolyte 3-10, and (f) endonuclease, is particularly preferred.

[0039] In one preferred embodiment, the kit according to the invention further comprises at least one antibody specific for a biomarker selected from the first group of said biomarkers and/or at least one antibody specific for a biomarker selected from the second group of said biomarkers, and reagents effective to detect said biomarker(s) in a serum sample, such as buffers for dissolving or equilibrating the standard (1) and/or the standard (2), or an enzyme substrate for imaging enzyme labels may be. In particular, a kit is preferred, comprising at least one antibody specific for a biomarker selected from the group consisting of Amy 1, Apo Al, Carbx, Casp, Fib-a, Fib-b, Fib-g, Clusterin, MHC-fB, SAP isoform and/or at least one antibody specific for a biomarker selected from the group consisting of HMW-K, Lifr-p, Orm 1, MBL-A, MBP-C.

[0040] More particular, it is preferred, if the at least one antibody is polyclonal, thus allowing a further enhancement of the system sensitivity.

[0041] Advantageously, the kit further comprises at least one labelled secondary antibody specific for the at least one antibody, thus allowing a fast screening of the binding of the at least one antibody to the at least one biomarker, in particular if the at least one biomarker or the digest thereof is immobilized to a solid phase support, such as nitrocellulose may be.

[0042] In a further aspect, the invention provides a method of qualifying the EGFR kinase activity in a subject, comprising determining in a body fluid sample of a subject suffering from or being susceptible to cancer at least one biomarker selected from the first group of said biomarkers and/or at least one biomarker selected from the second group of said biomarkers, wherein the body fluid level of the at least one biomarker of said first group being significantly higher and/or the body fluid level of the at least one biomarker of said second group being significantly lower than the level of said biomarker(s) in the body fluid of subjects without cancer, in particular without cancer associated with increased activity of EGFR, is indicative of induced EGFR kinase activity in the subject.

[0043] In particular, it is preferred, if the method comprises determining at least one biomarker selected from the first group of said biomarkers and at least one biomarker selected from the second group of said biomarkers, wherein the body fluid level of the at least one biomarker of said first group being significantly higher and the body fluid level of the at least one biomarker of said second group being significantly lower than the level of said biomarkers in the body fluid of subjects without cancer, in particular without cancer associated with increased activity of EGFR, is indicative of induced EGFR kinase activity in the subject, preferably if a combination of a biomarker selected from the group consisting of Amy 1, Apo Al, Carbx, Casp, Fib-a, Fib-b, Fib-g, Clusterin, MHC-fB, SAP isoform and a biomarker selected from the group consisting of HMW-K, Lifr-p, Orm 1, MBL-A, MBP-C

or a combination of
a biomarker selected from the group consisting of AFP, ApoE, ApoM and a biomarker selected from the group consisting of Gpx3, A2MG, A2MG isoform, SAP is determined.

[0044] Preferably, the method according to the invention is carried out for predicting the response of a cancer patient to a method of treating cancer comprising administering an EGFR kinase modulator, wherein the body fluid level of the at least one biomarker of said first group being significantly higher and/or the body fluid level of the at least one biomarker of said second group being significantly lower than the level of said biomarker(s) in the body fluid of subjects without cancer, in particular without cancer associated with increased activity of EGFR, is indicative that the subject will respond therapeutically to a method of treating cancer comprising administering an EGFR kinase modulator.

[0045] In one embodiment, the method is implemented for monitoring the therapeutically response of a cancer patient to a method of treating cancer comprising administering an EGFR kinase modulator, wherein the body fluid level of the at least one biomarker of said first group before and after the treatment and/or the body fluid level of the at least one biomarker of said second group before and after the treatment is determined, and a significant decrease of said body fluid level(s) of the at least one biomarker of said first group and/or a significant increase of said body fluid level(s) of the at least one biomarker of said second group after the treatment is indicative that the cancer patient therapeutically responds to the administration of the EGFR kinase modulator.

[0046] In a preferred embodiment, the method is implemented by performing an immunoassay, such as an enzyme immunoassay (EIA), a radio immunoassay (RIA) or a fluorescence immunoassay (FIA) may be, in particular by using the kit according to the invention and/or by performing a western blot. Preferably, at least one antibody specific for a biomarker selected from the group consisting of Amy 1, Apo Al, Carbx, Casp, Fib-a, Fib-b, Fib-g, Clusterin, MHC-fB, SAP isoform and/or at least one antibody specific for a biomarker selected from the group consisting of HMW-K, Lifr-p, Orm 1, MBL-A, MBP-C is used for the immunoassay and/or reagents effective to detect said biomarker(s) in a serum sample, such as a blocking buffer for reducing unspecific antibody binding or an enzyme substrate for imaging enzyme labelled antibodies may be, is used for the immunoassay.

[0047] In another preferred embodiment, the method is implemented by performing a peptide mass fingerprinting, in particular by using the kit described herein.

[0048] Within the context of peptide mass fingerprinting, the method preferably comprises
[0049] the steps of
   [0050] isolating a serum sample from a blood sample of a subject suffering from or being susceptible to cancer,
   [0051] adding lysis buffer to the serum sample;
   [0052] separating the proteins of the lysed serum sample by 2-DE gel electrophoresis;
   [0053] excising from the gel at least one sample containing a protein of interest;
   [0054] adding digesting buffer to the at least one excised sample, and
   [0055] determining the amount of the at least one protein of interest by analyzing the at least one digest mixture by mass spectrometry.

[0056] In one embodiment of the method, the subject is a human patient or a non-human transgenic animal, in particular suffering from or being susceptible to cancer, more particular suffering from or being susceptible to cancer of the liver, lung, breast, colon, prostate, bladder, head and neck, ovary or brain, such as a transgenic mouse, in particular a mouse whose genome comprises a non natural IgEGF sequence, may be.

[0057] In another embodiment of the method, the serum sample is isolated by centrifuging the blood sample;

[0058] In yet another embodiment of the method, the 2-DE is performed by using two different pH gradients, preferably by using the pH gradients 3-10 and 4-7.

[0059] In a further embodiment of the method, the lysis buffer comprises (a) at least one buffer component, (b) at least one chaotrope, (c) at least one detergens, (d) at least one reducing agent (e) at least one carrier ampholyte, and (f) at least one ribonuclease. Preferably, the lysis buffer used is an aqueous solution of (a) at least one buffer compound selected from the group consisting of Tris and HEPES, (b) at least one chaotrope selected from the group consisting of urea and thiourea, (c) at least one detergens selected from the group consisting of CHAPS and SDS, (d) at least one reducing agent selected from the group consisting of DTT and TCEP, (e) at least one carrier ampholyte selected from the group consisting of biolyte 5-7 and biolyte 3-10, and (f) at least one ribonuclease selected from the group consisting of endonuclease and exonuclease, wherein an aqueous solution of (a) Tris; (b) urea and thiourea, (c) CHAPS, (d) DTT, (e) biolyte 3-10, and (f) endonuclease, is particularly preferred. the lysis buffer comprises (a) at least one buffer component, (b) at least one chaotrope, (c) at least one detergens, (d) at least one reducing agent (e) at least one carrier ampholyte, (f) at least one ribonuclease is particularly preferred.

[0060] In yet a further embodiment of the method, the protein of interest is a biomarker selected from the first group of said biomarkers or is a biomarker selected from the second group of said biomarkers, in particular is selected from the first group consisting of Amy 1, Apo Al, Carbx, Casp, Fib-a, Fib-b, Fib-g, Clusterin, MHC-fB, SAP isoform or from the second group consisting of HMW-K, Lifr-p, Orm 1, MBL-A, MBP-C, or more preferably is selected from the first group consisting of AFP, ApoE, ApoM or from the second group consisting of Gpx3, A2MG, A2MG isoform, SAP.

[0061] In another embodiment of the method the digesting buffer comprises a bicarbonate compound and a protease, wherein the digesting buffer preferably is an aqueous solution of at least one bicarbonate compound selected from the group consisting of ammonium bicarbonate and sodium bicarbonate and of at least one serine protease, in particular selected from the group consisting of trypsin, chymotrypsin and elastase, or, in particular preferred, the digesting buffer is an aqueous solution of ammonium bicarbonate and trypsin.

[0062] In yet another embodiment of the method, the mass spectrometry is selected from the group consisting of MALDI-TOF and ESI-TOF, preferably the mass spectrometry is performed by MALDI-TOF.

[0063] In a further embodiment of the method, a tandem mass spectrometer is used for the peptide mass fingerprinting, wherein a MALDI-TOF/TOF spectrometry is particularly preferred for putting the method into practice.

[0064] In yet a further embodiment of the method, a matrix is used for the mass spectrometry selected from the group consisting of 3,5-dimethoxy-4-hydroxycinnamic acid, α-cyano-4-hydroxycinnamic acid and 2,5-dihydroxybenzoic acid, wherein α-cyano-4-hydroxycinnamic acid is particularly preferred as the matrix.

[0065] In another preferred embodiment of the method, the serum sample is calibrated or the serum samples are equilibrated to a predefined protein concentration by adding the lysis buffer, thus allowing an easy adaptation of the system to different purposes.

[0066] In particular, it is preferred, if the method further comprises the steps of
[0067] determining the protein concentration of the serum sample, in particular by the Bradford method; or
[0068] freezing and thawing the serum sample before the lysis buffer is added; and/or
[0069] staining the gel after the 2-DE, in particular by using coomassie blue; and/or
[0070] destaining the exised sample; or
[0071] shrinking, in particular by adding acetonitrile, and drying of the excised sample before the digesting buffer is added; or
[0072] using a peptide calibration standard for the mass spectrometry,
   wherein preferably a combination of said steps, in particular two of said steps, more preferably three of said steps, in particular four or five of said steps, most preferably all of said steps are implemented.

[0073] Yet another aspect of the invention concerns a procedure to screen for and to identify drugs against cancer associated with an increased EGFR kinase activity, wherein the procedure comprises determining in a body fluid sample of a transgenic cancer mouse being treated with a compound to be tested, in particular of a mouse whose genome comprises a non natural IgEGF sequence, at least one biomarker selected from the first group of said biomarkers and/or at least one biomarker selected from the second group of said biomarkers, and wherein the body fluid level of the at least one biomarker of said first group being significantly lower and/or the body fluid level of the at least one biomarker of said second group being significantly higher than the level of said biomarker(s) in the body fluid of an untreated transgenic cancer mouse is indicative of the therapeutic effect of said compound as an EGFR kinase modulator.

[0074] In a preferred embodiment, the procedure is implemented by using the method according the invention, in particular by using the method comprising an immunoassay or a peptide mass fingerprinting as described herein.

[0075] Further scope of applicability of the present invention will become apparent from the detailed description given hereinafter. However, it should be understood that the detailed description and specific examples, while indicating preferred embodiments of the invention, are given by way of illustration only, since various changes and modifications within the spirit and scope of the invention will become apparent to those skilled in the art from this detailed description.

[0076] Epidermal growth factor (EGF) is an important mitogen for hepatocytes. Its targeted overexpression induced hepatocellular carcinomas (HCC), as recently reported by us (Borlak et al. 2005). Early detection of disease is essential for successful therapy and overall survival. In particular, the efforts in identifying serum biomarkers of liver cancer in a transgenic disease model that mimics effectively the consequence of exaggerated EGF signalling are described. A reference 2-DE map of mouse serum proteins is reported. About 180 proteins were detected per gel and 130 proteins were identified by 2-DE-MALDI-MS analysis. Serum proteins of healthy non-transgenic and HCC tumor bearing mice were compared and 25 regulated proteins were identified, of which n=7 reached statistical significance (p<0.05). Furthermore, several fragments of fibrinogens and of the alpha-2-macroglobulin were identified to be disease associated. Also immunoglobulins were found to be repressed or absent in serum samples of tumor bearing mice, and this included, amongst others, the Ig K and L class. In contrast, amyloid component P and apolipoprotein M were highly significantly increased by 10- and 8-fold, respectively in serum samples of HCC-mice. Overall, the findings provide a rationale for further clinical evaluation of the herein identified biomarker candidates.

[0077] In the following, the findings with an EGF transgenic disease model of liver cancer are reported. This is an important growth factor mitogen for hepatocytes. Its targeted overexpression promoted hepatocellular carcinogenesis as recently reported by us.⁸ In general, the EGF gene codes for a 53 amino acid protein to stimulate proliferation of epidermal cells and a variety of other cell types through binding to the EGF receptor. This single-pass transmembrane receptor functions as a tyrosine kinase. Once activated, the EGFR becomes autophosphorylated to initiate signalling through tyrosine phosphorylation of other proteins.⁹ A total of four different EGF receptors (Her1, Her2, Her3, Her4) have been identified so far. Specifically, ligand binding induces either homo- and/or heterodimerisation. It is of considerable importance that EGFR connects to other signalling cascades as well, notably the MAP kinase pathway, to ultimately cause phosphorylation of transcription factors such as c-Fos, c-Jun and ELK-1, thereby fostering cell proliferation.⁹ EGFR is over expressed in a number of solid tumours and the expression level correlates well with tumour progression, resistance to chemotherapy and survival. Consequently, EGFR is an obvious target for the rational design of novel anticancer agents, i.e. inhibitors of the receptor kinase activity and/or antagonistic antibodies.¹⁰

[0078] Previously, targeted overexpression of a secretable form of EGF (IgEGF) has been reported to result in multiple highly malignant HCCs, with 100% fatalities around 7-8 months after birth.¹¹ This transgenic mouse line mimics effectively the consequence of an altered EGF and/or TNFα signalling. Recently, other mice models were successfully established to study the tumor biology of HCC in non-viral- and viral disease¹²⁻¹³. Through application of gene chip analysis it was possible to identify networks of EGF-regualted genes at various stages of tumour development.⁸ Here, the efforts to examine serum proteins of non-transgenic healthy and EGF overexpressing transgenic mice are reported. A reference 2-DE map of mouse serum proteins, consisting of more than 130 proteins, was created. After 2-DE analysis and gel image matching, 25 serum proteins were identified by peptide mass fingerprinting as being disease associated. These proteins are involved in a variety of cellular and metabolic pathways, amongst them: the glutathione peroxidase 3 (Gpx3) and the serum amyloid component P (SAP), their expression being up-regulated by up to 10-fold in tumour bearing mice.

[0079] Overall, this study aimed at identifying disease associated serum proteins in an EGF liver cancer disease model.

[0080] The serum proteome of healthy and HCC tumor bearing mice was investigated. As depicted in FIG. 1A, transgenic mice overexpressed EGF by approximately 26-fold. Furthermore, tumors were confirmed by histopathology, of which an example is given in FIG. 1B. Essentially, highly differentiated tumors were observed which were less differentiated at advanced stages of disease (see also Borlak et al., 2005 for further details).⁸ A total of 14 2-DE gels (n=5 independent serum control and n=9 independent serum of HCC mice) were processed for MALDI-TOF-MS analysis (see supplementary material 1, FIG. 5). This enabled the built up of a reference 2-D map of mouse serum proteins consisting of 130 proteins (FIG. 2A). 25 proteins were found to be differentially regulated of which n=7 were statistically significant (Table 1, FIG. 2B, 2C). Albumin is the most abundant serum protein; its quantification of the 2-DE gels gave a relative volume of approximately 34% (see supplementary material 2, FIG. 6). Other high abundance proteins include alpha-2-macroglobulin with a relative volume of 10%, transferrin (7%), apolipoprotein A1 (4%), plasminogen (4%) and several immunoglobulins (Igs) such as H—C, K and L (4%). Less abundant proteins were apolipoprotein E, apolipoprotein H, fibronectin, gelsolin, kininogen and ceruloplasmin. Several spots were identified at low molecular weights as albumin or fragments of it (FIG. 2 A) and more than 8 spots as alpha-2-macroglobulin (A2MG) (fragments) with mass ranges of 37-40 kDa (A2mG has a Mr of ˜165 kDa). At least 2 of these fragments were up-regulated in serum of tumour bearing mice and were increased by 3-fold (see table 1, FIG. 3E, supplementary material 8, FIG. 12). Furthermore, two isoforms were identified with identical pl but different Mr as well.

[0081] Additionally, the apolipoproteins Apo A-I, Apo E, Apo H, ApoM and ApoJ were identified. 6 different spots in the serum proteome maps were observed, which were identified by MALDI-TOF as Apo A-I (see supplementary material 3, FIG. 7) and at least 5 spots of apo H, also known as beta-2-glycoprotein I (see supplementary material 4, FIG. 8).

[0082] After in gel digestion, approximately 2500 spots were selected for MALDI-TOF-PMF analysis. In the supplementary table 1 accession number, protein name, theoretical pl and Mr together with Mascot score, identified peptides and sequence coverage are given. Furthermore, biological function, frequency of identification and protein expression in serum of tumor and/or healthy mice are summarized as well (see supplementary table 1). Among the 130 annotated proteins, 25 were differentially expressed (Table 1), of which 7 were up-regulated (apolipoprotein E, alpha-2-macroglobulin, alpha-2-macroglobulin*, alfafetoprotein, apolipoprotein M, serum amyloid component P, serine proteinase inhibitor) (FIG. 3C, 3E), where as 3 proteins were down-regulated (glutathione peroxidase 3, properdin, major urinary protein 1) (FIG. 3A). Moreover, 10 proteins were found in serum of tumor bearing mice only (amylase 1, apo A-I, carboxylesterase, caspase, clusterin, fibrinogen-α, fibrinogen-β, fibrinogen-γ, major histocompatibility complex factor B, serum amyloid component P*), but 5 proteins were exclusively identified in serum sample of healthy control animals (mannose binding lectin A, orosomucoid 1, HMW-kininogen II, leukemia inhibitory factor receptor, mannose binding protein-C) (FIG. 3G).

[0083] In tumor bearing mice, most of the up-regulated serum proteins are apolipoproteins. Among them, apoM was up-regulated by 8-fold (FIG. 3C, 4B, supplementary material 6, FIG. 10). ApoM is seen as an important biomarker candidate and its significance is discussed later on. Furthermore, apolipoproteins are closely associated with amyloid fibrillogenesis. Indeed, serum amyloid A, apolipoprotein (apo) All and apo Al are deposited as biochemically distinct forms of amyloid.¹⁴ In serum samples of HCC bearing mice, the serum amyloid component P (SAP) was strongly increased. This protein belongs to the group of acute-phase reactants (APRs) (FIG. 3C, 4D). Here SAP is evidenced to be highly disease associated in HCC and a putative isoform (SAP*) in sera of tumour bearing mice is identified (see table 1, supplementary material 7) with a lower theoretical pl value.

[0084] In addition, several isoforms of alpha-2-macroglobulin were found (see FIG. 2A, supplementary material 8, FIG. 12) to be induced in HCC. To the best of our knowledge, the overexpression of the newly identified fragments have not been reported for HCC so far. In general, the serum concentration of A2MG is about 2 g/l in adults but displays little variation with age or in acute and chronic disease. It therefore may qualify as a bonafide candidate serum biomarker for HCC. Further, decreased concentration of proteins of the acute phase response in serum of HCC mice were observed. This group of proteins, designated as negative acute phase proteins, included major urinary protein 1 (MUP1), glutathione peroxidase 3 (Gpx3), properdin, and several immunoglobulins (Igs). (see table 1, FIG. 3A). Specifically, plasma glutathione peroxidase 3 (Gpx3), a glycosylated protein, was repressed when serum samples from healthy non-transgenic and tumor bearing mice were compared. In 2D gels two different spots are visible e.g. Gpx3* and Gpx3 while only one isoform was repressed in serum samples of tumour bearing mice (Gpx3) (see FIG. 3A, supplementary material 9, FIG. 13).

[0085] In the present study, also cancer-related fibrinogen deposition in serum of HCC bearing mice is identified (see table 1, FIG. 3D, supplementary material 10, FIG. 14). Plasmin-generated fragments of fibrinogen alpha, beta and gamma (Fga, Fgb, Fgg) were already observed in various types of solid tumor types. In fact, elevated levels of Fgg and acute phase proteins were reported for plasma proteins of prostate-, lung-, and breast-cancer patients.¹⁵⁻¹⁶

[0086] As of today overexpression of FGG was reported for two hepatoma cell lines, e.g. SMMC-7721 and HepG2.¹⁷ Up-regulation of Fgg in EGF induced HCC is now evidenced, as well. Specifically, not all tumor samples expressed the three fibrinogens (see FIG. 4A, supplementary material 10, FIG. 14), but this agrees well with the findings of Gerner et al., who reported Fgg to be present in 58% of the cases (14/24 analyzed plasma cancer samples.¹⁵⁻¹⁶ Elevated plasma levels of Fgg, as observed in serum of EGF transgenic mice may be viewed as indicators for tumor-associated fibrin deposition and fibrinolysis. Fibrinolysis is mediated mainly via the plasma protease plasmin, which exerts pleiotropic effects.¹⁸⁻²⁰

[0087] Furthermore, the complement system is known to contain at least 30 different proteins, which are primarily formed in the liver and circulate in their inactive form. These proteins, when activated, produce various complexes that play a major role in the natural defense mechanisms of the human body. Several proteins of the complement system were identified to be regulated. This included the mannose binding lectine A and the mannose binding protein C (present in serum of healthy non-transgenic mice only), and the major histocompatibility complex factor B (MHC-fB) which was found to be up regulated. MHC-fB was identified in healthy and HCC serum samples, but an activated form/fragment of this protein was found in serum of HCC mice only in the range of Mw 65-68 kDa (see table 1, FIG. 3F). These fragments could be the result of proteolitic processes in tumours.

[0088] Also, orosomucoid 1, also known as alpha 1-acid glycoprotein, was identified in sera of health non tumor bearing animals (see table 1, FIG. 3G). This protein is synthesised by the liver, and functions in modulating the activity of the immune system during the acute-phase reaction. Several studies report an up regulation of this protein in patients with HCC and suggest orosomucoid as a useful marker for discriminating the stage of inflammatory reactions.²¹⁻²³ Finally, an up regulation of the oncofetal protein Afp was observed in sera of HCC-mice (FIG. 3C, 4C). Indeed, Afp is routinely assayed for liver damage and its malignancies.

[0089] To confirm results by different means, 4 proteins regulated in all gels were selected for Western Blot analysis. A total of n=5 serum samples of tumor bearing mice were probed for Fib-γ, ApoM, Afp (FIG. 4 A,B,C), where as n=4 serum samples was used for SAP (FIG. 4 D). Fib-γ was expressed only in 3 out of the 5 serum samples analyzed.

[0090] Serum biomarkers of HCC were searched for and a serum proteome map of EGF induced HCC is reported. Comparison between sera of healthy and tumour animals revealed significant differences in expression of several proteins. A total of 25 proteins was identified as differentially expressed. Specifically, proteins of the acute phase response were found to be down regulated. This group of proteins included mannose binding lectin a (MBL-A), major urinary protein 1 (MUP 1), orosomucoid 1 (Orm1), glutathione peroxidase 3 (Gpx3) and several immunoglobulins (Igs) (see table 1, supplementary material 11). In contrast, Apo E was up regulated in serum of HCC mice. Notably, Yokoyama and coworkers observed increased expression of apo E in 88% of HCC tumor tissue without an increase of apo E gene expression and/or elevated serum level.¹⁹ These results do not agree with the findings as serum levels of apo E were increased by 2-fold (FIG. 3E and supplementary material 5, FIG. 9). An overexpression of ApoE has already been observed in brain²⁴, breast²⁵, ovarian²⁶, prostate²⁷ and HCC tumor tissues.²⁸

[0091] Another up-regulated apolipoprotein was apoM. This protein is mainly associated with high-density lipoprotein (HDL) in human plasma, and a small proportion in triglyceride-rich (TGRLP) and low-density lipoproteins (LDL). During embryogenesis, apo M is over expressed in livers of 3-5 month-old human embryos and continues to be strongly expressed throughout embryogenesis, but thereafter returns to much lower levels. Apo M is found as an important biomarker candidate. Furthermore, there is evidence for platelet-activating factor (PAF) to be involved in the up-regulation of apo M in HepG2 cells, but Luo and coworkers reported decreased apo M mRNA transcript levels in HepG2 cells in response to epidermal growth factor (EGF) treatment.²⁹⁻³⁰ It is of considerable importance that apo M gene expression may also be regulated by hepatocyte nuclear factor-1α (HNF-1α), which was found to be repressed in tumor tissue of EGF transgenic mice (results of Western Blot not shown).³¹ Furthermore, the apo M gene is located within the histocompatibility complex III (HMC-III) region of chromosome 6 and many genes in this region code for immune response.³⁰ Whether apo M is co-regulated by the host defense system requires additional research.

[0092] In general, apolipoproteins are important in maintaining the structural integrity of lipoprotein particles thereby facilitating the solubilisation of lipids. Additionally, they play a crucialrole in lipoprotein receptor recognition and regulation of lipoprotein metabolism. In humans, about 60% of the protein content in high-density lipoprotein (HDL) is represented by apo A-I and about 20% by apo A-II. Other apolipoproteins include apo A-IV, apo C, apo D and apo E. Most of these proteins are expressed as different isoforms. Recently, it was suggested that apo A-I exists in six isoforms, 4 of them displaying differences in glycosylation pattern.³²

[0093] Likewise, apo-H displays genetic polymorphism, with three alleles, namely APOH*1, APOH*2, APOH*3, at a single locus on chromosome 17.³³ This protein has been identified as a structural component of chylomicrons, very low-density lipoproteins (VLDL), low-density lipoproteins (LDL) and HDL. In human plasma, 35% of apo-His associated with chylomicrons.³⁴ Various properties have been ascribed to this protein, e.g. function as an antigen of antiphospholipid antibodies, or acute-phase reactant and may have some involvement in the HBV infection of hepatocytes as well.³⁵⁻³⁶

[0094] Our study identified A2MG to be strongly upregulated in HCC. This protein is an abundant plasma protein produced predominantly by the mammalian liver. A2MG is a member of the protease inhibitor 139 (A2M) family and is able to inhibit all four classes of proteinases by a unique ‘trapping’ mechanism located in a ‘bait region’, which contains specific cleavage sites for different proteinases. When a proteinase cleaves the bait region, a conformational change of the protein is induced, which then traps the proteinase. The entrapped enzyme remains still active against low molecular weight substrates, but is poorly accessible for reaction with high molecular weight substrates. Mouse A2MG has a Mr of ˜165 kDa; notably, more than 8 spots as A2MG fragments with mass ranges of 37-40 kDa were identified. At least 2 of these fragments were up regulated in serum of tumor bearing mice and were increased by 3-fold (see table 1, FIG. 3E, supplementary material 8, FIG. 5). Furthermore, two isoforms with identical pl but different Mw were identified as well. In breast and trophoblastic cancers, A2MG may be less useful as a tumor marker.³⁷ In contrast, serum A2MG levels in patients with ovarian carcinomas are significantly elevated.³⁸⁻³⁹

[0095] Likewise, the study also evidenced repression of glutathione peroxidase 3 (Gpx3) in HCC bearing mice. Gpx3 is one of at least 25 selenocysteine-containing protein with antioxidant properties in mammals. It is one of the five known glutathione peroxidases and is unique among members of the Gpx family as this protein is the only extracellular isoform. Gpx3 is secreted from renal proximal tubular cells and epithelial cells of the Bowman's capsule. While Gpx3 deficiency has been associated with cardiovascular disease and with renal dysfunction or infertility of males, little is known about its association with HCC.⁴³⁻⁴¹ Strikingly, plasma selenium concentration is decreased in patients with cirrhosis, as reported by Burk and coworkers, who investigated glutathione peroxidase (GSHPx-3) and selenoprotein P expression, in patients with cirrhosis and in healthy control subjects.⁴² Equally, studies on selenium availability and expression of selenoproteins (Gpx1, Gpx3, thioredoxin reductase and selenoprotein P mRNA) in mouse fibrosarcoma cells evidenced selenium to exert a statistically significant effect on Gpx3 transcript expression.⁴³ Whether selenium availability is reduced in HCC requires further studies.

[0096] Also, high proteolytic activity in sera of HCC bearing mice was observed. Recently, Chignard et al. detected protein fragments in HCC patient sera as well, identified as calreticulin and protein disulfide isomerase A3.⁴⁴ Generally, plasma proteases are capable of activating growth factors by cleavage of their inert proforms.⁴⁵ High proteolytic activity of proteases in plasma of cancer patients has been reported.¹⁶ This may also be linked to an overexpression of SAP, apo M and other serum proteins in HCC bearing mice as reported in the study. An acute phase response is observed in the majority of cancer patients⁴⁶ and could represent an adaptive response to an exaggerated proteolytic activity. In fact, during tumor growth these proteins accumulate in peripheral blood and may interfere by a direct anti-apoptotic mode on tumor necrosis factor-induced apoptosis of hepatocytes as suggested by Van Molle et al, 1997.⁴⁷⁻⁴⁸

[0097] Finally, disease associated regulation of a fragment of Factor B in serum of HCC mice was found. Factor B is a serine proteinase of the antibody-independent, alternative pathway of complement activation, an important humoral response of the host defense system against invading pathogens. In addition, fragments of the factor B exert cytokine-like activities to cause B lymphocyte proliferation and differentiation, macrophage spreading and monocyte mediated cytotoxicity. The major site of MHC-fB expression is the liver, as evidenced by allotype changes of serum MHC-fB following liver transplantation. MHC-fB is a positive acute phase reactant. It's hepatic synthesis and serum level are increased during the acute phase of the inflammatory response.⁴⁹

[0098] Overall, serum amyloid component P (SAP), apolipoprotein M (apo M), alpha-2-macroglobulin (A2MG) and fibrinogens (Fga, Fgb, Fgg) are found as beneficial candidates for HCC-diagnostics, since their serum levels were increased by 10-, 8- and 3-fold, respectively. Furthermore, fibrinogens were identified in serum samples of HCC mice only, but their expression was variable. The current available screening tests to detect early liver malignancies combine α-fetoprotein analysis and ultrasound. Even though screening for early detection of HCC has become more common, its effectiveness in disease diagnostics remains controversial.⁵⁰ There is a need to search for new, robust and specific markers for the detection of HCC at early stages of disease to allow for curative rather than palliative interventions. Since blood serum contains high concentrations of abundant proteins such as albumin, transferrin, haptoglobin and immunoglobulins, their removal may be advantageous to enable detection and identification of less abundant proteins. Unfortunately, many of the target proteins are bound to abundant proteins; thus, depletion of serum of major proteins using affinity chromatography, specific antibodies or size-exclusion filtration may also lead to removal of less abundant proteins and therefore loss of biomarkers. In conclusion, the use of 2-DE combined with MALDI-TOF-MS, analysis provided evidence for 25 differentially expressed proteins in serum of HCC bearing mice, of which n=7 reached statistical significance. Several proteins, so far unknown to be regulated in HCC, have been identified and represent beneficial biomarkers useful for implementing the invention.

### Materials

[0099] A UP 200S sonicator (Dr. Hielscher GmbH, Germany) was used to homogenize the samples. For the first dimension, immobilized pH-gradient (IPG) strips (17 cm, pH 3-10 non linear) were purchased from Bio-Rad (Hercules, Calif. USA). The focusing chamber was Protean IEF Cell (Bio-Rad). For the second dimension a Protean plus Dodeca Cell (Bio-Rad) was used.

[0100] Reagents: tris, urea, thiourea, CHAPS, dithiothreitol, bromophenol blue, glycerin, sodium dodecyl sulphate, glycin, temed, ammoniumperoxodisulphate, ammonium sulphate, ammonium bicarbonate, colloidal coomassie blue and acrylamide were purchased from Roth (Karlsruhe, Germany). Iodacetamide was from SERVA (Heidelberg, Germany). Benzonase was purchased from Novagen (Darmstadt, Germany). Ampholytes (Biolyte 3-10) were purchased from Bio-Rad (Hercules, Calif. USA).

### Animal Care

[0101] The creation of the EGF2B transgenic line was described earlier by Tönjes et al. (1995). Transgenic mice were maintained as hemizygotes in the CD2F1-(DBA/2xBalb/c) background. PCR was carried out with Platinum PCRSuperMix (InVitrogen). Annealing temperature and the number of cycles are indicated in brackets after each primer pair. The transgene was verified by PCR of DNA extracted from tail biopsies (Hogan et al., 1994) and the following forward primer (fp) and reverse primer (rp) pair was used for a transgene specific amplification: forward primer: 5′-CTAGGCCAAGGGCCTTGGGGGCTCTTGCAG-3′ (SEQ ID NO 1); reverse primer: 5′-CATGCGTATTTGTCCAGAGCTTCGATGTA-3′ (SEQ ID NO 2) (61° C., 32 cycles, 317 bp).

[0102] Animals, aged 6-8 months and of the weight of 25-33 g, were housed in Makrolon® Type III cages. Drinking water and food (V1124-000, SSNIFF, Holand) was given ad libitum. Temperature and relative humidity were 22±2° C. and 40-70% respectively. Furthermore, a 12 h day and night cycle was used. For serum protein identification, mice were sacrificed with CO₂ and blood was taken from the Vena cava. Then, blood was centrifuged (20 min., 6000 rpm, at room temperature) and serum was immediately frozen at −80° C. None of the serum samples were hemolytic.

### Sample Preparation

[0103] Five micro liters of sera from n=4/group non-transgenic control and from n=6/group tumor bearing animals were used for further 2-DE analysis. The protein concentration of serum was determined by the Bradford method. For each animal 0.5 mg of protein sample, approximately 3 μL of serum, were diluted to a final volume of 350 μL with a lysis buffer containing 40 mM tris base, 5 M urea, 2 M thiourea, 4% CHAPS, 100 mM DTT, 0.5% (v/v) biolyte 3-10 and endonuclease (6 μL/mL).

### Two-Dimensional Gel Electrophoresis-2-DE

[0104] A total of n=8 2-DE gels for control serum samples and n=12 2-DE gels for serum of tumor bearing mice were prepared as follow: IEF was performed using precast 17 cm IPG strips 3-10 NL. 0.5 mg of protein was loaded by active rehydration (12 h, 50 V). Focusing started at 250 V for 20 min. in rapid mode, 10000 V for 5 h in linear mode and 10000 V for 50000 Vh in rapid mode. Each sample was analyzed in duplicate.

[0105] After IEF, the IPG strips were either stored at −80° C. or transferred to 10 mL equilibration buffer (6 M urea, 30% w/v glycerin, 2% w/v SDS, 50 mM Tris-HCl pH 8.8) with 2% w/v DTT and 0.5% v/v bromophenol blue solution (0.25% w/v bromophenol blue, 1.5 M Tris-HCl pH 8.8, 0.4% w/v SDS) and incubated for 20 min. at room temperature. Strips were removed and incubate in equilibration buffer with 4% w/v iodoacetamide and 0.5% v/v bromophenol blue solution for further 20 min. at room temperature. Finally, strips and 10 μL SDS-PAGE molecular weight standard on filter paper were placed on top of the 20 cm×20.5 cm 12% second-dimension gel (12% v/v acrylamide/bis solution, 375 mM Tris, pH 8.8, 0.1% v/v SDS, 1/2000 TEMED, 0.05% v/v APS). Both were fixed in place with a 0.5% w/v agarose overlay. Gels were run in PROTEAN Plus Dodeca cell from Bio-Rad at 70 V for approximately 14 h, followed by 200 V until the bromophenol blue dye reached the bottom of the gel. The running buffer (25 mM Tris, 0.2 M glycin, 0.1% SDS) was cooled externally to 16° C.

[0106] Gels/proteins were fixed overnight in 30% ethanol, 2% phosphoric acid, washed 3×20 min. with 2% phosphoric acid. The gels were equilibrated with 15% ammoniumsulfate, 18% ethanol, 2% phosphoric acid for 15 min and finally stained with colloidal coomassie blue for 48 h.

### Gel Scanning and Image Analysis

[0107] After staining, gels were washed 10 min with pure water and scanned on a Molecular FX Scanner Bio-Rad at 100 μm resolution. Protein spots were imaged first automatically and then manually and analyzed using the PDQuest™ software Bio-Rad. The normalization was carried out in total density in gel mode according to the manufactures recommendations. For reproducibility, two experiments were performed, each time running 4-control and 6-tumor samples for a total of 20 gels. From them, 14 gels were chosen and used for spot excision and MS analysis. The gels with higher number of spots were selected; all spots (about 180 spots per gel) were excised for MS analysis

### MALDI-MS

[0108] A total of 2500 spots from 14 gels were excised using the spot cutter of Bio-Rad and placed into 96-well microtiter plates. Excised gel spots were washed with 20 μL of water for 10 min. and destained twice with 15 μL ammonium bicarbonate 50 mM for 5 min. first and then with 15 μL 50% ammonium bicarbonate 50 mM-50% acetonitrile for 5 min. Finally, gel particles were covered by acetonitrile until gel pieces shrunk and left dry for 10 min. Gels/proteins were digested in situ with 4 μL of ammonium bicarbonate 50 mM containing 20 ng trypsin (Sequencing Grade Modified Trypsin Promega). After 15 min. each gel peace was re-swelled with 10 μL of ammonium bicarbonate 50 mM and incubated for 4 h at 37° C. After 4 h the reaction was stopped by adding 10 μL of trifluoro acetic acid 1% containing 1.5% (w/v) n-octyl-β-D-glucopyranoside (OGP) (AppliChem). For the application of the samples, 4 μL of peptide solution were loaded on a MTP Anchor Chip Target 600/384 (Bruker Daltonics) previously prepared with a saturated solution of matrix, α-cyano-4-hydroxy-cinnamic acid (α-HCCA) (Bruker Daltonics). An external calibration was performed by spotting on the 96 calibration positions of the Anchor Chip Target 1 μL of peptide calibration standards (Bruker Daltonics) containing the following peptides: angiotensin II (1046.5420 Da), angiotensin I (1296.6853 Da), substance P (1347.7361 Da), bombesin (1619.8230 Da), ACTH clip 1-17 (2093.0868 Da), ACTH clip 18-39 (2465.1990 Da), somatostatin 28 (3147.4714 Da) and OGP 1.5% (w/v). Samples were analyzed in a MALDI-TOF/TOF spectrometer (Ultraflex, Bruker Daltonics) using an accelerating voltage of 25 kV for the Peptide Mass Fingerprint (PMF) mode. Peptide matching and protein searches were performed automatically with the MASCOT 2.0 software. For the PMF search the parameters were the following: C-carbaimidomethyl (fixed modification), M-oxidation (variable modification), monoisotopic (mass value), 100 ppm (peptide mass tolerance), 1 (max missed cleavage), mammalia (taxonomy). Five matching peptides and at least 10% peptide coverage of the theoretical sequences was the minimal requirement for an identity assignment. The identified proteins were organized with the ProteinScape™ database (Protagen-Bruker Daltonics), checked individually and only mouse proteins or highly homologous sequences from other species were considered.

[0109] In conclusion, the EGF receptor plays an important role in various tumor diseases. Its hyperactivity can cause cancer of numerous organs. By detecting early stages of tumor growth a dramatic reduction in the mortality rate of cancer patients can be achieved. To date, though, diagnostic markers for liver cancer, such as alpha-Fetoprotein (AFP) and the Des-Gamma-Carboxyprothrombin (DCP) are insufficient for the definite diagnosis of tumor disease.

[0110] The studies according to the invention provide new information on the role of EGF in tumorigenesis. The serum proteomics facilitates the discovery of biomarkers and enables an improved early detection of cancers and therapeutic monitoring in the various treatment strategies.

[0111] An EGF-transgenic mouse model has been developed and by using this model the consequences of a changed EGF-signalling in the emergence of liver cancer has been investigated. The mouse model is very similar to the human hepatocellular carcinoma allowing research on the various stages of cancerogenesis.

[0112] With the help of genomic platform technologies molecular events referring to the individual stages of tumor development could be investigated. Also, the analyses of tumor specific proteins and serum proteins according to the invention provided beneficial approaches for identifying potential serum biomarkers of liver tumors.

[0113] Blood proteins are easily accessible. Therefore, great efforts are undertaken worldwide to seek serum biomarkers for monitoring the course of disease in patients. Changes in the expression of serum-proteins or -peptides are easy to measure even in the early stages of the disease to measure, well in advance before the disease phenotype associated with significant metabolic damage manifests.

[0114] A major drawback in serum proteome analytics is, however, the complexity of the sample to be analyzed. For this reason, several additional methods for removing abundant proteins, such as albumin, have been developed to facilitate an identification of the less prevalent and disease associated proteins.

[0115] However, the pre-treatment of serum samples is problematic, since proteins that only occur in small quantities are lost. Moreover, the prefractioning of serum proteins is costly in terms of time. Here, the efforts for analyzing the serum proteome while avoiding an pre-fractioning are described.

[0116] The EGF2B-transgenic mouse has already been described in a previous publication. For the serum proteome analysis blood serum was obtained both from wild type mice as well as tumor mice.

[0117] By using a lysis buffer containing thiourea the serum proteins were extracted and separated by 2D-gelelektrophoresis (2-DE) with the use of two different pH-gradients (3-10, 4-7).

[0118] Subsequently to colloidal Coomassie-blue staining the spots were cut from the 2D-gel with a spot cutter. Then, the gel samples were washed, discolored and digested with trypsin.

[0119] An over-expression of EGF in transgenic mice was confirmed by RT-PCR. As previously described in detail, HCC-disease was induced by liver specific overexpression of EGF. In the genomic studies, also signal proteins regulated by an excessive EGF-tyrosine kinase activity could be identified.

[0120] Using genome wide gene expression analysis, new candidate genes that play a role in tumor formation were identified. Some were changed depending on the degree of differentiation of the tumor, so for example the expression of TGFα and PDGFα. Increased expression of eps-15, a substrate of the EGFR was likewise observed.

[0121] In less differentiated tumors, the activation of the RhoC-kinase was particularly pronounced. In all of the tumors the expression of cell cycle-regulating proteins such as junB, c-fos, egr-1, and the survival factor IGFBP1 was significantly increased.

[0122] The oncogenomic studies revealed important information about the serum proteome analyses and were affected by the motivation to find new diagnostic biomarkers for HCC.

[0123] For overcoming the technical difficulties, the analysis of the serum proteome had to be improved so that as many proteins as possible could be identified after separation with high-resolution 2-DE by mass spectrometric methods (MALDI-MS).

[0124] With the help of differential display, tumor-associated serum proteins were discovered in the 2D-gel electrophoresis.

[0125] In addition, it was possible to automate the MS-analysis of the trypsin-digested proteins.

[0126] The different behavior of matrix peptide mixtures in peptide mass fingerprinting has already been published in numerous studies.

[0127] It was further a goal to automate the MS and MS/MS-analyses in order to detect tumor serum proteins in a high-throughput format. For example, with the help of this method the zinc-alpha-2-Glycoprotein could be identified with an outstanding sequence coverage.

[0128] This was achieved by the use of α-cyano-4-hydroxycinnamic acid in matrix preparations. In addition, this improved mass spectroscopic method also allows access to information on posttranslational modifications such as phosphorylation and glycosylation.

[0129] With the help of this newly developed protocol, a reference list of the serum-proteome was created, which enables an important basis for studies in healthy and tumor diseased subjects.

[0130] Table 1. List of the 25 differentially regulated proteins. Proteins are sorted according to their name. NCBI accession number, MASCOT score, percent of sequence coverage and number of identified peptides (Match) are given. Protein function, p-value, mean fold change and frequency of in gel identification are also reported in table 1.
[0131] Spots were present in 2 gels, but only 1 spot was cut and analyzed for MALDI mass spectrometry identification.
[0132] Isoform

### Supplementary Material 1 (FIG. 5):

[0133] Outline of the experiments. Two experiments were carried out. In the experiment 1, n=1 control serum (non transgenic mouse) (C1) was run in duplicate and then studied for the search and identification of proteins; n=3 tumour (T1, T2, T3) sera of bearing mice (EGF) were run in duplicate and then studied for the search and identification of proteins.

[0134] In the experiment 2, n=4 control sera (non transgenic mice) (C1, C2, C3, C4) and n=4 tumour sera (T1, T4, T5, T6) were run and then processed for protein identification. In summary a total of 5 gels were studied for the control samples (grey boxes) and a total of 9 gels (grey boxes) were studied for the tumour samples.

(IEF: isoelectric focusing; 2-DE: two dimensional electrophoresis

### Supplementary Material 2 (FIG. 6):

[0135] Distribution of relative volumes of identified proteins.

[0136] Primary hepatocellular carcinoma (HCC) is worldwide a common neoplasm with approximately 600 000 death per year. Early detection of tumor growth is essential for therapy and overall survival. Disease-associated proteins have been searched in the sera of HCC bearing mice, which specifically developed HCC, as a result of targeted overexpression of epidermal growth factor (EGF). The picture depicts the distribution of the relative volumes of the spots in the quantification of the 2-DE gels

### Supplementary Material 3 (FIG. 7)

[0137] The six spots of Apo A-I in 2-D gels.

### Supplementary Material 4 (FIG. 8)

[0138] The five spots of Apo H in 2-D gels.

### Supplementary Material 5 (FIG. 9)

[0139] Overexpression and ppm values of apolipoprotein E (apo E) in sera of HCC mice. R=ppm ratio (tumour/control).

### Supplementary Material 6 (FIG. 10):

[0140] Overexpression and ppm values of apolipoprotein M (apo M) in sera of HCC mice. R=ppm ratio (tumour/control).

### Supplementary Material 7 (FIG. 11):

[0141] Overexpression and ppm values of serum amyloid component P (SAP). (A, B): control samples. (D, E): sera of HCC mice, the second SAP isoform, SAP*, is identified in sera of HCC mice only. (C, F): 3-D view of SAP spots in control and HCC mice respectively. R=ppm ratio (tumour/control).

### Supplementary Material 8 (FIG. 12)

[0142] Overexpression and ppm values of two A2MG-fragments in sera of HCC mice (E, F, G, H). The x and y isoforms (A, E). R=ppm ratio (tumour/control).

### Supplementary Material 9 (FIG. 13):

[0143] Down-regulation of glutathione peroxidase 3 (Gpx3). (A, C): control samples, gpx3 is present in two isoforms, Gpx3* and Gpx3. (B, D): tumour samples, the isoform Gpx3 is down regulated, while the isoform Gpx3* is now virtually absent.

### Supplementary Material 10 (FIG. 14):

[0144] (A): Expression of fibrinogens alpha, beta and gamma (Fga, Fgb, Fgg) in sera of HCC mice. (B, C, D): zoom view of the gels; Not all tumor animals carried the three fibrinogens in sera.

### Supplementary Material 11 (FIG. 15):

[0145] Down regulation of immunoglobulins. Many immunoglobulins were virtually absent in tumor samples (B).

### Supplementary Table 1. Serum Proteins

[0146] A total of 2500 spots derived from 14 gels were excised and digested with trypsin (Promega). Peptides were loaded on a MTP Anchor Chip Target 600/384 (Bruker Daltonics) previously prepared with HCCA and analyzed in a MALDI-TOF-TOF spectrometer (Ultraflex I, Bruker Daltonics). Peptide matching and protein searches were performed automatically with the MASCOT 2.0 software. MASCOT scores are also reported in the table (see column “Mascot Score”). Five matching peptides (see column “N° of matched peptides”) and at least 10%) peptide coverage of the theoretical sequences was the minimal requirement for an identity assignment (see column “Coverage”). The identified proteins were organized with the ProteinScape™ database (Bruker Daltonics) and checked individually.

[0147] In the table proteins are sorted by alphabetical order in the second column and the NCBI annotation is given in the first column. The theoretical pl, MW, and biological function are given herein. Expression of proteins and frequency of identification are reported in the column “regulation” and “gels” respectively.

### Supplementary Table 2. Sequences of the Identified Peptides.

TABLE 1

| | | | | N° of | | | Regulation | |
|---|---|---|---|---|---|---|---|---|
| Acc. Number | | Mascot | Sequence | matched | | p- | (tumor/ | |
| (NCBI) | Protein Name | Score | Coverage % | peptides | Function | value | kontrol) | Gels |
| gi\|191765 | Alpha fetoprotein | 234 | 39.2 | 16 | Unknown | 0.035 | 1.6 | 3 |
| gi\|14318646 | Amylase 1, | 72.5 | 23.1 | 13 | Unknown | — | tumor | 3 |
| | salivary | | | | | | | |
| gi\|6753096 | Apolipoprotein | 84.2 | 32.3 | 20 | Reverse transport of cholesterol | — | tumor | 4 |
| | A-I | | | | from tissues to the liver | | | |
| gi\|6753102 | Apolipoprotein | 220 | 60.5 | 18 | Binding and transport | 0.035 | 2.2 | 12 |
| | E | | | | | | | |
| gi\|9055162 | Apolipoprotein | 114 | 45.3 | 9 | Lipid transport. | 0.044 | 8 | 8 |
| | M | | | | | | | |
| gi\|2921308 | Carboxylesterase | 93.3 | 26.4 | 14 | Metabolism of xenobiotics | — | tumor | 2 |
| | precursor | | | | | | | |
| gi\|13899173 | Caspase recruitment | 70.3 | 11.7 | 9 | Promotion of apoptosis. | — | tumor | 2 |
| | domain protein 12 | | | | | | | |
| gi\|49523333 | Clusterin | 79.6 | 22.1 | 10 | Maybe binding to cells, | — | tumor | 4 |
| | (Apolipoprotein | | | | membranes and hydrophobic | | | |
| | J) | | | | proteins. | | | |
| gi\|33563252 | Fibrinogen, alpha | 204 | 47.2 | 26 | Cofactor in platelet aggregation | — | tumor | 1° |
| | polypeptide | | | | | | | |
| gi\|33859809 | Fibrinogen, beta | 263 | 59.9 | 29 | Cofactor in platelet aggregation | — | tumor | 1° |
| | polypeptide | | | | | | | |
| gi\|19527078 | Fibrinogen, gamma | 234 | 60.6 | 22 | Cofactor in platelet aggregation | — | tumor | 1° |
| | polypeptide | | | | | | | |
| gi\|52843238 | Glutathione | 117 | 43 | 9 | Unknown | 0.002 | 0.2 | 4 |
| | peroxidase 3 | | | | | | | |
| gi\|40715898 | HMW-kininogen-II | 106 | 25.5 | 9 | Unknown | — | control | 2 |
| | variant | | | | | | | |
| gi\|21594125 | Lifr protein | 95.5 | 20.4 | 10 | Unknown | — | control | 3 |
| gi\|8569601 | Major urinary | 161 | 73.5 | 11 | Binds pheromones | 0.22 | 0.14 | 3 |
| | protein 1 | | | | | | | |
| gi\|6754654 | Mannose binding | 113 | 45.6 | 10 | Binds mannose and N− | — | control | 5 |
| | lectin (A) | | | | acetylglucosamine in a Ca++ | | | |
| | | | | | dependent way | | | |
| gi\|233018 | Mannose-binding | 160 | 49.6 | 13 | Unknown | — | control | 3 |
| | protein C; MBP-C | | | | | | | |
| gi\|387437 | MHC factor B | 246 | 58.5 | 30 | Complement system | — | tumor | 4 |
| gi\|6679182 | Orosomucoid 1 | 100 | 34.8 | 10 | Acute-phase reaction | — | control | 4 |
| gi\|53787 | Properdin | 143 | 32.5 | 16 | Complement system. | 0.1036 | 0.4 | 6 |
| | (AA 5-441) | | | | | | | |
| gi\|34785996 | A2MG | 216 | 22.3 | 22 | Endopeptidase inhibitor. | 0.0018 | 1.8 | 14 |
| gi\|34785996 | A2MG * | 216 | 22.3 | 22 | Endopeptidase inhibitor. | 2.6 e-5 | 3.2 | 14 |
| gi\|6679383 | Serine (or cysteine) | 124 | 35 | 17 | Inhibitor or plasmin, trypsin, | 0.3033 | 4.7 | 5 |
| | proteinase | | | | and chymotrypsin | | | |
| | inhibitor, clade F, | | | | | | | |
| | member 2; plasmin | | | | | | | |
| | inhibitor alpha 2; | | | | | | | |
| | alpha 2 antiplasmin; | | | | | | | |
| | serine (or cysteine) | | | | | | | |
| | proteinase inhibitor, | | | | | | | |
| | clade F (alpha-2 | | | | | | | |
| | antiplasmin, | | | | | | | |
| | pigment epithelium | | | | | | | |
| | derived factor), | | | | | | | |
| | member 2 [Mus | | | | | | | |
| | musculus] | | | | | | | |
| gi\|38174334 | Serum amyloid | 122 | 37.5 | 9 | Unknown | 0.0103 | 10 | 7 |
| | P-component | | | | | | | |
| gi\|38174334 | Serum amyloid | 92.3 | 27.2 | 7 | Unknown | — | tumor | 4 |
| | P-component * | | | | | | | |

SUPPLEMENTARY TABLE 1

| | | | | | | N° of | | Regulation | |
|---|---|---|---|---|---|---|---|---|---|
| Acc. Number | | | | Mascot | Sequence | matched | | (tumor/ | |
| (NCBI) | Protein Name | pI | Mr (kDa) | Score | Coverage % | peptides | Function | control) | Gels |
| gi\|15277503 | ACTB protein | 5.5 | 40.2 | 249 | 61.4 | 20 | Actins are highly conserved | | 2 |
| | | | | | | | proteins that are involved in various | | |
| | | | | | | | types of cell motility and are | | |
| | | | | | | | ubiquitously expressed in all | | |
| | | | | | | | eukaryotic cells | | |
| gi\|71621 | Actin beta | 5.2 | 41.6 | 192 | 65.2 | 19 | Involved in various types of cell | | 1 |
| | | | | | | | motility. | | |
| gi\|21553101 | Afamin | 5.5 | 69.6 | 146 | 38.1 | 18 | Transport | | 5 |
| gi\|20072386 | Afm protein | 5.6 | 47.6 | 186 | 50.4 | 20 | Transport | | 11 |
| gi\|11277085 | Albumin | 5.4 | 51.4 | 283 | 56.7 | 22 | Serum albumin, the main protein of | | 13 |
| | (fragment) | | | | | | plasma, has a good binding | | |
| | | | | | | | capacity for water, Ca(2+), Na(+), | | |
| | | | | | | | K(+), fatty acids, hormones, | | |
| | | | | | | | bilirubin and drugs. Its main | | |
| | | | | | | | function is the regulation of the | | |
| | | | | | | | colloidal osmotic pressure of blood | | |
| gi\|33859506 | Albumin 1 | 5.7 | 68.7 | 421 | 65.6 | 37 | Transport | | 14 |
| gi\|42542817 | Alpha | 5.6 | 67.3 | 111 | 43 | 18 | Unknown | up | 3 |
| | fetoprotein | | | | | | | regulated | |
| gi\|191765 | Alpha | 5.4 | 47.2 | 234 | 39.2 | 16 | Unknown | up | 9 |
| | fetoprotein | | | | | | | regulated | |
| gi\|191844 | Alpha-1 | 5.3 | 44.8 | 166 | 60.4 | 19 | Inhibitor of serine proteases. Its | | 7 |
| | protease | | | | | | primary target is elastease, but it | | |
| | inhibitor 2 | | | | | | also has a moderate affinity for | | |
| | | | | | | | plasmin and thrombin. | | |
| gi\|31982171 | Alpha-2 | 6 | 165.1 | 131 | 22.6 | 31 | A proteinase activates the inhibitor | | 9 |
| | macroglobulin | | | | | | by specific proteolysis in the bait | | |
| | MUG1 | | | | | | region, which, by an unknown | | |
| | | | | | | | mechanism leads to reaction at the | | |
| | | | | | | | cysteinyl-glutamyl internal thiol | | |
| | | | | | | | ester site and to a conformational | | |
| | | | | | | | change, whereby the proteinase is | | |
| | | | | | | | trapped and/or covalently bound to | | |
| | | | | | | | the inhibitor. While in the tetrameric | | |
| | | | | | | | proteinase inhibitors steric | | |
| | | | | | | | inhibition is sufficiently strong, | | |
| | | | | | | | monomeric forms need a covalent | | |
| | | | | | | | linkage between the activated | | |
| | | | | | | | glutamyl residue of the original thiol | | |
| | | | | | | | ester and a terminal amino group of | | |
| | | | | | | | a lysine or another nucleophilic | | |
| | | | | | | | group on the proteinase, for | | |
| | | | | | | | inhibition to be effective | | |
| gi\|7304875 | Alpha-2-HS- | 6.1 | 37.3 | 98.8 | 48.4 | 13 | Probably involved in differentiation. | | 8 |
| | glycoprotein | | | | | | | | |
| | (Fetuin) | | | | | | | | |
| gi\|14318646 | Amylase 1, | 6.6 | 57.6 | 72.5 | 23.1 | 13 | Unknown | tumor | 3 |
| | salivary | | | | | | | | |
| gi\|425520 | Anti-colorectal | 6.2 | 26.5 | 88.8 | 40.7 | 6 | Unknown | | 1 |
| | carcinoma | | | | | | | | |
| | light chain | | | | | | | | |
| gi\|26345182 | Apolipoprotein | 5.4 | 30.6 | 163 | 62.5 | 18 | Participates in the reverse transport | | 12 |
| | A1 (Unnamed | | | | | | of cholesterol from tissues to the | | |
| | protein | | | | | | liver for excretion by promoting | | |
| | product) | | | | | | cholesterol efflux from tissues and | | |
| | | | | | | | by acting as a cofactor for the | | |
| | | | | | | | lecithin cholesterol acyltransferase | | |
| | | | | | | | (LCAT). | | |
| gi\|14789706 | Apolipoprotein | 5.3 | 45 | 292 | 73.9 | 25 | May have a role in chylomicrons | | 10 |
| | A4 | | | | | | and VLDL secretion and | | |
| | | | | | | | catabolism. Required for efficient | | |
| | | | | | | | activation of lipoprotein lipase by | | |
| | | | | | | | ApoC-II; potent activator of LCAT. | | |
| | | | | | | | Apoa-IV is a major component of | | |
| | | | | | | | HDL and chylomicrons. | | |
| gi\|6753096 | Apolipoprotein | 5.4 | 30.5 | 84.2 | 32.3 | 20 | Participates in the reverse transport | tumor | 4 |
| | A-I | | | | | | of cholesterol from tissues to the | | |
| | | | | | | | liver for excertion by promoting | | |
| | | | | | | | cholesterol efflux from tissues and | | |
| | | | | | | | by acting as a cofactor for the | | |
| | | | | | | | lecithin cholesterol acyltransferase | | |
| | | | | | | | (LCAT). | | |
| gi\|6753102 | Apolipoprotein | 5.7 | 33.2 | 220 | 60.5 | 18 | Mediates the binding, | up | 12 |
| | E | | | | | | internalization, and catabolism of | regulated | |
| | | | | | | | lipoprotein particles. It can serve as | | |
| | | | | | | | a ligand for the LDL (apo B/E) | | |
| | | | | | | | receptor and for the specific apo-E | | |
| | | | | | | | receptor (chylomicron remnant) of | | |
| | | | | | | | hepatic tissues. | | |
| gi\|1938223 | Apolipoprotein | 9.7 | 36.3 | 153 | 59.1 | 15 | Binds to various kinds of negatively | | 12 |
| | H (beta-2 | | | | | | charged substances such as | | |
| | glycoprotein | | | | | | heparin, phospholipids, and | | |
| | I) | | | | | | dextran sulfate. May prevent | | |
| | | | | | | | activation of the intrinsic blood | | |
| | | | | | | | coagulation cascade by binding to | | |
| | | | | | | | phospholipids on the surface of | | |
| | | | | | | | damaged cells. | | |
| gi\|9055162 | Apolipoprotein | 6.1 | 21.3 | 114 | 45.3 | 9 | Probably involved in lipid transport. | up | 8 |
| | M | | | | | | | regulated | |
| gi\|2921308 | Carboxylesterase | 5 | 61.1 | 93.3 | 26.4 | 13 | Involved in the detoxification of | tumor | 2 |
| | precursor | | | | | | xenobiotics and in the activation of | | |
| | | | | | | | ester and amide prodrugs. Involved | | |
| | | | | | | | in the extracellular metabolism of | | |
| | | | | | | | lung surfactant | | |
| gi\|13899173 | Caspase | 6.27 | 116.1 | 70.3 | 11.7 | 9 | Plays a role in the promotion of | tumor | 2 |
| | recruitment | | | | | | apoptosis | | |
| | domain | | | | | | | | |
| | protein 12 | | | | | | | | |
| gi\|49523333 | Clusterin | 5.4 | 51.7 | 79.6 | 22.1 | 10 | Not yet clear. It is known to be | tumor | 4 |
| | (Apolipoprotein | | | | | | expressed on a variety of tissues | | |
| | J) | | | | | | and it seems to be able to bind to | | |
| | | | | | | | cells, membranes and hydrophobic | | |
| | | | | | | | proteins. It has been associated | | |
| | | | | | | | with programmed cell death. | | |
| gi\|6753798 | Coagulation | 6 | 70.3 | 215 | 45 | 24 | Thrombin, which cleaves bonds | | 10 |
| | factor II | | | | | | after Arg and Lys, converts | | |
| | (prothrombin) | | | | | | fibrinogen to fibrin and activates | | |
| | | | | | | | factors V, VII, VIII, XIII, and in | | |
| | | | | | | | complex with thrombomodulin, | | |
| | | | | | | | protein C. | | |
| gi\|13624321 | Coagulation | 6.6 | 76 | 190 | 32.8 | 19 | The B chain of factor XIII is not | | 3 |
| | factor XIII, beta | | | | | | catalytically active, but is thought to | | |
| | subunit | | | | | | stabilize the A subunits and | | |
| | | | | | | | regulate the rate of | | |
| | | | | | | | transglutaminase formation by | | |
| | | | | | | | thrombin. | | |
| gi\|6996919 | Complememnt | 7.1 | 85 | 264 | 52 | 30 | Cell proliferation and complement | | 12 |
| | histocompatibility | | | | | | activation, alternative pathway. | | |
| | 2, complement | | | | | | | | |
| | component | | | | | | | | |
| | factor B | | | | | | | | |
| gi\|28175786 | Complement C3 | 6.4 | 186.4 | 289 | 29 | 40 | C3 plays a central role in the | | 12 |
| | precursor | | | | | | activation of the complement | | |
| | (HSE-MSF) | | | | | | system. Its processing by C3 | | |
| | | | | | | | convertase is the central reaction in | | |
| | | | | | | | both classical and alternative | | |
| | | | | | | | complement pathways. After | | |
| | | | | | | | activation C3b can bind covalently, | | |
| | | | | | | | via its reactive thiolester, to cell | | |
| | | | | | | | surface carbohydrates or immune | | |
| | | | | | | | aggregates. | | |
| gi\|220349 | Complement C4 | 9.1 | 59.2 | 217 | 47.9 | 22 | C4 plays a central role in the | | 8 |
| | | | | | | | activation of the classical pathway | | |
| | | | | | | | of the complement system. It is | | |
| | | | | | | | processed by activated C1 which | | |
| | | | | | | | remove from the alpha chain the | | |
| | | | | | | | C4a anaphylatoxin. | | |
| gi\|309119 | Complement | 6 | 46.6 | 93.9 | 33.8 | 11 | Controls the pathway of | | 1 |
| | C4b-binding | | | | | | complement activation. It | | |
| | protein | | | | | | accelerates the degradation of the | | |
| | precursor | | | | | | C4bC2a complex. It interacts with | | |
| | | | | | | | SAP | | |
| gi\|15030019 | Complement | 5.7 | 86.6 | 207 | 39 | 27 | Involved in the formation of the lytic | | 2 |
| | component 6 | | | | | | c5b-9m complex | | |
| gi\|27462724 | Complement | 4.8 | 76.9 | 72.3 | 18.3 | 9 | C1s B chain is a serine protease | | 1 |
| | component | | | | | | that combines with C1q and C1s to | | |
| | C1SA | | | | | | form C1, the first component of the | | |
| | | | | | | | classical pathway of the | | |
| | | | | | | | complement system. C1r activates | | |
| | | | | | | | C1s so that it can, in turn, activate | | |
| | | | | | | | C2 and C4 | | |
| gi\|19072788 | Complement | 6.6 | 139 | 264 | 32 | 30 | Factor H functions as a cofactor in | | 10 |
| | component | | | | | | the inactivation of C3b by factor I | | |
| | | | | | | | and also increases the rate of | | |
| | factor h | | | | | | dissociation of the C3bBb complex | | |
| | | | | | | | (C3 convertase) and the (C3b)NBB | | |
| | | | | | | | complex (C5 convertase) in the | | |
| | | | | | | | alternative complement pathway | | |
| gi\|6671744 | Complement | 9.2 | 67.2 | 87.6 | 21.7 | 7 | Responsible for cleaving the alpha- | | 6 |
| | component | | | | | | chains of C4b and C3b in the | | |
| | factor i | | | | | | presence of the cofactors C4- | | |
| | | | | | | | binding protein and factor H | | |
| | | | | | | | respectively. | | |
| gi\|9954973 | Complement D | 5 | 31.1 | 75.1 | 38.3 | 10 | C3 plays a central role in the | | 1 |
| | Chain D, N- | | | | | | activation of the complement | | |
| | Terminally | | | | | | system. Its processing by C3 | | |
| | Truncated C3dg | | | | | | convertase is the central reaction in | | |
| | Fragment | | | | | | both classical and alternative | | |
| | | | | | | | complement pathways. After | | |
| | | | | | | | activation C3b can bind covalently, | | |
| | | | | | | | via its reactive thiolester, to cell | | |
| | | | | | | | surface carbohydrates or immune | | |
| | | | | | | | aggregates. Derived from | | |
| | | | | | | | proteolytic degradation of | | |
| | | | | | | | complement C3, C3a | | |
| | | | | | | | anaphylatoxin is a mediator of local | | |
| | | | | | | | inflammatory process. It induces | | |
| | | | | | | | the contraction of smooth muscle, | | |
| | | | | | | | increases vascular permeability | | |
| | | | | | | | and causes histamine release from | | |
| | | | | | | | mast cells and basophilic | | |
| | | | | | | | leukocytes. The short isoform has | | |
| | | | | | | | B-cell stimulatory activity. | | |
| gi\|6754132 | Complement | 5.1 | 37.3 | 217 | 53.2 | 18 | Involved in the presentation of | | 9 |
| | histocompatibility | | | | | | foreign antigens to the immune | | |
| | 2, Q region locus | | | | | | system | | |
| | 10 | | | | | | | | |
| gi\|54173 | Contraspin | 5 | 46.7 | 259 | 60.5 | 22 | Contrapsin inhibits trypsin-like | | 6 |
| | | | | | | | proteases | | |
| gi\|38614350 | Cp protein | 5.5 | 121.1 | 248 | 40.5 | 36 | Ceruloplasmin is a blue, copper- | | 13 |
| | | | | | | | binding (6-7 atoms per molecule) | | |
| | | | | | | | glycoprotein found in plasma. Four | | |
| | | | | | | | possible functions are ferroxidase | | |
| | | | | | | | activity, amine oxidase activity, | | |
| | | | | | | | copper transport and homeostasis, | | |
| | | | | | | | and superoxide dismutase activity. | | |
| gi\|19388017 | Cpn2 protein | 5.5 | 62 | 112 | 29.7 | 11 | The 83 kDa subunit binds and | | 5 |
| | | | | | | | stabilizes the catalytic subunit at 37 | | |
| | | | | | | | degrees Celsius and keeps it in | | |
| | | | | | | | circulation. Under some | | |
| | | | | | | | circumstances it may be an | | |
| | | | | | | | allosteric modifier of the catalytic | | |
| | | | | | | | subunit | | |
| gi\|11055360 | Epidermal growth | 6.8 | 71.4 | 239 | 43.4 | 22 | cell proliferation-cellular | | 9 |
| | factor receptor | | | | | | morphogenesis-epidermal growth | | |
| | isoform 2 | | | | | | factor receptor signaling pathway | | |
| | | | | | | | positive regulation of cell | | |
| | | | | | | | proliferation-protein amino acid | | |
| | | | | | | | autophosphorylation-regulation of | | |
| | | | | | | | peptidyl-tyrosine phosphorylation | | |
| | | | | | | | signal transduction | | |
| gi\|6679689 | Esterase 1 | 4.9 | 61.1 | 164 | 46.8 | 18 | Involved in the detoxification of | | 9 |
| | | | | | | | xenobiotics and in the activation of | | |
| | | | | | | | ester and amide prodrugs. Involved | | |
| | | | | | | | in the extracellular metabolism of | | |
| | | | | | | | lung surfactant | | |
| gi\|33563252 | Fibrinogen, alpha | 7 | 61.3 | 204 | 47.2 | 26 | Fibrinogen has a double function: | tumor | 1° |
| | polypeptide | | | | | | yielding monomers that polymerize | | |
| | | | | | | | into fibrin and acting as a cofactor | | |
| | | | | | | | in platelet aggregation | | |
| gi\|33859809 | Fibrinogen, beta | 6.5 | 54.8 | 263 | 59.9 | 29 | Fibrinogen has a double function: | tumor | 1° |
| | polypeptide | | | | | | yielding monomers that polymerize | | |
| | | | | | | | into fibrin and acting as a cofactor | | |
| | | | | | | | in platelet aggregation | | |
| gi\|19527078 | Fibrinogen, | 5.5 | 49.4 | 234 | 60.6 | 22 | Fibrinogen has a double function: | tumor | 1° |
| | gamma | | | | | | yielding monomers that polymerize | | |
| | polypeptide | | | | | | into fibrin and acting as a cofactor | | |
| | | | | | | | in platelet aggregation | | |
| gi\|1181242 | Fibronectin | 5.2 | 160.9 | 161 | 23.5 | 25 | Fibronectins bind cell surfaces and | | 5 |
| | | | | | | | compounds including collagen, | | |
| | | | | | | | fibrin, heparin, DNA, and actin. | | |
| | | | | | | | They are involved in cell adhesion, | | |
| | | | | | | | cell motility, opsonization, wound | | |
| | | | | | | | healing, and maintenance of cell | | |
| | | | | | | | shape. Interaction with TNR | | |
| | | | | | | | mediates inhibition of cell adhesion | | |
| | | | | | | | and neurite outgrowth. | | |
| gi\|46849812 | Fibronectin 1 | 5.4 | 272.5 | 349 | 31 | 59 | Fibronectins bind cell surfaces and | | 9 |
| | | | | | | | various compounds including | | |
| | | | | | | | collagen. fibrin, heparin, DNA, and | | |
| | | | | | | | actin. Fibronectins are involved in | | |
| | | | | | | | cell adhesion, cell motility, | | |
| | | | | | | | opsonization, wound healing, and | | |
| | | | | | | | maintenance of cell shape. | | |
| | | | | | | | Interaction with TNR mediates | | |
| | | | | | | | inhibition of cell adhesion and | | |
| | | | | | | | neurite outgrowth. | | |
| gi\|28916693 | Gelsolin | 5.8 | 85.9 | 255 | 47.6 | 28 | Calcium-regulated, actin- | | 12 |
| | | | | | | | modulating protein that binds to the | | |
| | | | | | | | plus (or barbed) ends of actin | | |
| | | | | | | | monomers or filaments, preventing | | |
| | | | | | | | monomer exchange (end-blocking | | |
| | | | | | | | or capping). It can promote the | | |
| | | | | | | | assembly of monomers into | | |
| | | | | | | | filaments (nucleation) as well as | | |
| | | | | | | | sever filaments already formed. | | |
| gi\|52843238 | Glutathione | 9.1 | 25.4 | 117 | 43 | 9 | Unknown | down | 4 |
| | peroxidase 3 | | | | | | | regulated | |
| gi\|17512357 | Gpld1 protein | 6.3 | 93.6 | 125 | 19.4 | 16 | This protein hydrolyzes the inositol | | 3 |
| | | | | | | | phosphate linkage in proteins | | |
| | | | | | | | anchored by phosphatidylinositol | | |
| | | | | | | | glycans (GPI-anchor) thus | | |
| | | | | | | | releasing these proteins from the | | |
| | | | | | | | membrane. | | |
| gi\|1694789 | GRS protein | 5.3 | 20.1 | 70 | 44.6 | 5 | Retards apoptosis induced by IL-3 | | 1 |
| | | | | | | | deprivation. May function in the | | |
| | | | | | | | response of hemopoietic cells to | | |
| | | | | | | | external signals and in maintaining | | |
| | | | | | | | endothelial survival during infection | | |
| gi\|37719755 | GUGU alpha | 6.2 | 44.4 | 155 | 50.6 | 16 | Multifunction | | 3 |
| gi\|23956086 | Hemopexin | 9 | 51.3 | 238 | 55.7 | 23 | Binds heme and transports it to the | | 11 |
| | | | | | | | liver for breakdown and iron | | |
| | | | | | | | recovery, after which the free | | |
| | | | | | | | hemopexin returns to the | | |
| | | | | | | | circulation | | |
| gi\|50082914 | High molecular | 4.7 | 53.2 | 89.2 | 27.7 | 11 | (1) Kininogens are inhibitors of thiol | | 3 |
| | weight kininogen | | | | | | proteases; (2) HMW-kininogen | | |
| | I isoform DeltaD5 | | | | | | plays an important role in blood | | |
| | | | | | | | coagulation by helping to position | | |
| | | | | | | | optimally prekallikrein and factor XI | | |
| | | | | | | | next to factor XII; (3) HMW- | | |
| | | | | | | | kininogen inhibits the thrombin- and | | |
| | | | | | | | plasmin-induced aggregation of | | |
| | | | | | | | thrombocytes; (4) the active | | |
| | | | | | | | peptide bradykinin that is released | | |
| | | | | | | | from HMW-kininogen shows a | | |
| | | | | | | | variety of physiological effects: (4A) | | |
| | | | | | | | influence in smooth muscle | | |
| | | | | | | | contraction, (4B) induction of | | |
| | | | | | | | hypotension, (4C) natriuresis and | | |
| | | | | | | | diuresis, (4D) decrease in blood | | |
| | | | | | | | glucose level, (4E) it is a mediator | | |
| | | | | | | | of inflammation and causes (4E1) | | |
| | | | | | | | increase in vascular permeability, | | |
| | | | | | | | (4E2) stimulation of nociceptors | | |
| | | | | | | | (4E3) release of other mediators of | | |
| | | | | | | | inflammation (e.g. prostaglandins), | | |
| | | | | | | | (4F) it has a cardioprotective effect | | |
| | | | | | | | (directly via bradykinin action, | | |
| | | | | | | | indirectly via endothelium-derived | | |
| | | | | | | | relaxing factor action); (5) LMW- | | |
| | | | | | | | kininogen inhibits the aggregation | | |
| | | | | | | | of thrombocytes; (6) LMW- | | |
| | | | | | | | kininogen is in contrast to HMW- | | |
| | | | | | | | kininogen not involved in blood | | |
| | | | | | | | clotting | | |
| gi\|40715898 | HMW-kininogen- | 6 | 51 | 86.4 | 25.8 | 12 | (1) Kininogens are inhibitors of thiol | control | 2 |
| | II variant | | | | | | proteases; (2) HMW-kininogen | | |
| | | | | | | | plays an important role in blood | | |
| | | | | | | | coagulation by helping to position | | |
| | | | | | | | optimally prekallikrein and factor XI | | |
| | | | | | | | next to factor XII; (3) HMW- | | |
| | | | | | | | kininogen inhibits the thrombin- and | | |
| | | | | | | | plasmin-induced aggregation of | | |
| | | | | | | | thrombocytes; (4) the active | | |
| | | | | | | | peptide bradykinin that is released | | |
| | | | | | | | from HMW-kininogen shows a | | |
| | | | | | | | variety of physiological effects: (4A) | | |
| | | | | | | | influence in smooth muscle | | |
| | | | | | | | contraction, (4B) induction of | | |
| | | | | | | | hypotension, (4C) natriuresis and | | |
| | | | | | | | diuresis, (4D) decrease in blood | | |
| | | | | | | | glucose level, (4E) it is a mediator | | |
| | | | | | | | of inflammation and causes (4E1) | | |
| | | | | | | | increase in vascular permeability, | | |
| | | | | | | | (4E2) stimulation of nociceptors | | |
| | | | | | | | (4E3) release of other mediators of | | |
| | | | | | | | inflammation (e.g. prostaglandins), | | |
| | | | | | | | (4F) it has a cardioprotective effect | | |
| | | | | | | | (directly via bradykinin action, | | |
| | | | | | | | indirectly via endothelium-derived | | |
| | | | | | | | relaxing factor action); (5) LMW- | | |
| | | | | | | | kininogen inhibits the aggregation | | |
| | | | | | | | of thrombocytes; (6) LMW- | | |
| | | | | | | | kininogen is in contrast to HMW- | | |
| | | | | | | | kininogen not involved in blood | | |
| | | | | | | | clotting | | |
| gi\|31615671 | Ig (A Chain A, | 5.5 | 23.6 | 76.4 | 44.4 | 6 | Host defense | control | 3 |
| | Crystal Structure | | | | | | | | |
| | Of Fab Fragment | | | | | | | | |
| | Of Antibody | | | | | | | | |
| | Hyhel-26 | | | | | | | | |
| | Complexed with | | | | | | | | |
| | Lysozyme) | | | | | | | | |
| gi\|4930001 | Ig (A Chain A, | 6 | 23.7 | 65.8 | 41.6 | 7 | Host defense | control | 4 |
| | Idiotope-Anti- | | | | | | | | |
| | Idiotope Fab- | | | | | | | | |
| | Fab Complex) | | | | | | | | |
| gi\|11514687 | Ig (A Chain A, | 7.4 | 23.6 | 78.7 | 49.3 | 6 | Host defense | control | 1 |
| | Lyme Disease | | | | | | | | |
| | Antigen Ospa In | | | | | | | | |
| | Complex With | | | | | | | | |
| | Neutralizing | | | | | | | | |
| | Antibody Fab | | | | | | | | |
| | La-2) | | | | | | | | |
| gi\|42543442 | Ig (A Chain A, | 9.4 | 24.2 | 89.2 | 44.7 | 6 | Host defense | control | 2 |
| | S25-2-Kdo | | | | | | | | |
| | Monosaccharide | | | | | | | | |
| | Complex) | | | | | | | | |
| gi\|7766934 | Ig (A Chain A, | 6 | 23.8 | 78.2 | 42.9 | 6 | Host defense | control | 1 |
| | Structure Of An | | | | | | | | |
| | Activity | | | | | | | | |
| | Supressing Fab | | | | | | | | |
| | Fragment To | | | | | | | | |
| | Cytochrome | | | | | | | | |
| | P450 Aromatase) | | | | | | | | |
| gi\|27373551 | Ig (antibody | 7 | 12.7 | 68.5 | 48.7 | 5 | Host defense | tumor | 1 |
| | variable domain) | | | | | | | | |
| gi\|1870378 | Ig (Anti-DNA | 6.3 | 11.6 | 109 | 57 | 6 | Host defense | up | 5 |
| | immunoglobulin | | | | | | | regulated | |
| | light chain IgG) | | | | | | | | |
| gi\|12002896 | Ig (anti-human | 7.4 | 23.5 | 82.4 | 44.6 | 7 | Host defense | control | 1 |
| | apolipoprotein | | | | | | | | |
| | A monoclonal | | | | | | | | |
| | antibody | | | | | | | | |
| | mAb(a)23L kappa | | | | | | | | |
| | light chain) | | | | | | | | |
| gi\|349893 | Ig (C Chain C, | 7.8 | 24 | 114 | 47.5 | 8 | Host defense | control | 1 |
| | Fab (Igg2a, | | | | | | | | |
| | Kappa) Fragment | | | | | | | | |
| | (26-10) Complex | | | | | | | | |
| | With Digoxin) | | | | | | | | |
| gi\|47059057 | Ig (gamma-2b- | 8.9 | 51.9 | 59 | 29 | 8 | Host defense | tumor | 2 |
| | immunoglobulin) | | | | | | | | |
| gi\|1806128 | Ig | 9.3 | 51.7 | 88.4 | 41.9 | 12 | Host defense | | 5 |
| | (immunoglobulin | | | | | | | | |
| | constant heavy | | | | | | | | |
| | chain) | | | | | | | | |
| gi\|10121892 | Ig | 5.2 | 26 | 76.9 | 42.1 | 7 | Host defense | control | 3 |
| | (immunoglobulin | | | | | | | | |
| | IgM MP-18-3-117 | | | | | | | | |
| | kappa light chain) | | | | | | | | |
| gi\|196723 | Ig | 5.6 | 10.9 | 125 | 61.6 | 7 | Host defense | control | 2 |
| | (immunoglobulin | | | | | | | | |
| | kappa- | | | | | | | | |
| | chain VK-1) | | | | | | | | |
| gi\|18033701 | Ig | 5.5 | 11.3 | 65.6 | 70.2 | 5 | Host defense | control | 1 |
| | (immunoglobulin | | | | | | | | |
| | light chain | | | | | | | | |
| | constant region) | | | | | | | | |
| gi\|13399686 | Ig (L Chain L, | 6 | 23.9 | 115 | 70.5 | 10 | Host defense | control | 5 |
| | 64m-2 Antibody | | | | | | | | |
| | Fab Complexed | | | | | | | | |
| | With D | | | | | | | | |
| | (5ht)(6-4)t) | | | | | | | | |
| gi\|3212470 | Ig (L Chain L, | 5.7 | 23.1 | 104 | 58.6 | 5 | Host defense | control | 2 |
| | Anti Taq | | | | | | | | |
| | Fab Tp7) | | | | | | | | |
| gi\|5542523 | Ig (L Chain L, | 9.3 | 24.1 | 107 | 66.2 | 11 | Host defense | control | 2 |
| | Bactericidal | | | | | | | | |
| | Antibody Against | | | | | | | | |
| | Neisseria | | | | | | | | |
| | Meningitidis) | | | | | | | | |
| gi\|16975338 | Ig (L Chain L, | 6.6 | 23.6 | 102 | 69.2 | 11 | Host defense | control | 2 |
| | Crystal Structure | | | | | | | | |
| | Of | | | | | | | | |
| | Immunoglobulin | | | | | | | | |
| | Fab Fragment | | | | | | | | |
| | Complexed | | | | | | | | |
| | With 17-Beta- | | | | | | | | |
| | Estradiol) | | | | | | | | |
| gi\|18655521 | Ig (L Chain L, | 4.8 | 23.9 | 81.1 | 56.4 | 8 | Host defense | | 2 |
| | Crystal Structure | | | | | | | | |
| | Of The Fab | | | | | | | | |
| | Fragment Of The | | | | | | | | |
| | Mouse Anti- | | | | | | | | |
| | Human Fas | | | | | | | | |
| | Antibody Hfe7a) | | | | | | | | |
| gi\|1942810 | Ig (L Chain L, | 6.4 | 24.2 | 124 | 80 | 12 | Host defense | control | 2 |
| | Fab Fragment | | | | | | | | |
| | Of A Neutralizing | | | | | | | | |
| | Antibody | | | | | | | | |
| | Directed Against | | | | | | | | |
| | An Epitope | | | | | | | | |
| | Of Gp41 From | | | | | | | | |
| | Hiv-1) | | | | | | | | |
| gi\|7546516 | Ig (L Chain L, | 5.6 | 23.7 | 72.4 | 37 | 5 | Host defense | control | 1 |
| | Fab Fragment Of | | | | | | | | |
| | Neutralising | | | | | | | | |
| | Monoclonal | | | | | | | | |
| | Antibody 4c4 | | | | | | | | |
| | Complexed With | | | | | | | | |
| | G-H Loop From | | | | | | | | |
| | Fmdv) | | | | | | | | |
| gi\|17943084 | Ig (L Chain L, | 7.8 | 24.2 | 118 | 59.1 | 8 | Host defense | control | 2 |
| | Structural Basis | | | | | | | | |
| | For Disfavored | | | | | | | | |
| | Elimination | | | | | | | | |
| | Reaction In | | | | | | | | |
| | Catalytic | | | | | | | | |
| | Antibody 1d4) | | | | | | | | |
| gi\|2624723 | Ig (L Chain L, | 7.3 | 24 | 69.9 | 45.7 | 8 | Host defense | control | 1 |
| | Structure Of A | | | | | | | | |
| | Catalytic | | | | | | | | |
| | Antibody, Igg2a | | | | | | | | |
| | Fab Fragment) | | | | | | | | |
| gi\|32263981 | Ig (mAb | 9.9 | 11.6 | 80.9 | 59.9 | 7 | Host defense | control | 1 |
| | immunoglobulin | | | | | | | | |
| | light chain | | | | | | | | |
| | variable region) | | | | | | | | |
| gi\|18568342 | Ig (monoclonal | 6.5 | 26.1 | 77.8 | 51.7 | 8 | Host defense | control | 1 |
| | antibody BBK-2 | | | | | | | | |
| | light chain) | | | | | | | | |
| gi\|52382 | Ig (mu(b) | 6.4 | 50 | 153 | 40.7 | 19 | Host defense | control | 1 |
| | immunoglobulin | | | | | | | | |
| | heavy chain) | | | | | | | | |
| gi\|7439167 | Ig (PC4436 | 8.7 | 49.3 | 92.6 | 29.1 | 8 | Host defense | | 2 |
| | monoclonal | | | | | | | | |
| | antibody 13-1 | | | | | | | | |
| | heavy chain) | | | | | | | | |
| gi\|15824610 | Ig (Pterin- | 7.8 | 12 | 75.4 | 77.5 | 5 | Unknown | control | 1 |
| | mimicking anti- | | | | | | | | |
| | idiotope kappa | | | | | | | | |
| | chain variable | | | | | | | | |
| | region) | | | | | | | | |
| gi\|780265 | Ig gamma-1 chain | 9 | 17.3 | 70.5 | 38.8 | 8 | Host defense | | 3 |
| | C region (15C5) | | | | | | | | |
| | (fragment) | | | | | | | | |
| gi\|1799551 | Ig gamma-chain, | 9.4 | 36.2 | 88.5 | 31 | 9 | Host defense | | 1 |
| | secrete-type | | | | | | | | |
| gi\|223428 | Ig H-C allotype | 7.8 | 36.6 | 174 | 56 | 19 | Host defense | | 9 |
| | gamma2b | | | | | | | | |
| gi\|224008 | Ig J chain | 4.4 | 15.8 | 111 | 42.4 | 9 | Host defense | control | 2 |
| gi\|12832551 | Ig K (unnamed | 6.4 | 23.2 | 98 | 43.1 | 8 | Host defense | control | 2 |
| | protein product) | | | | | | | | |
| gi\|896077 | Ig kappa chain | 7.6 | 8.7 | 90.1 | 74.7 | 6 | Host defense | control | 3 |
| gi\|896089 | Ig kappa chain | 9.5 | 10.5 | 82 | 82.3 | 6 | Host defense | control | 1 |
| gi\|896103 | Ig kappa chain | 4.3 | 10.3 | 64.7 | 57.9 | 5 | Host defense | control | 3 |
| gi\|896107 | Ig kappa chain | 4.6 | 9.1 | 71.6 | 71.8 | 5 | Host defense | control | 1 |
| gi\|7513693 | Ig kappa chain | 6.4 | 23.6 | 104 | 58.9 | 11 | Host defense | control | 1 |
| | (Mab03-1) | | | | | | | | |
| gi\|110429 | Ig kappa chain V | 9.1 | 10.4 | 73.4 | 58.5 | 6 | Host defense | control | 1 |
| | region (9.42 | | | | | | | | |
| gi\|49258884 | Ig kappa chain V | 9.3 | 11.8 | 70.1 | 50.9 | 7 | Host defense | control | 3 |
| | region (D444) | | | | | | | | |
| gi\|930226 | Ig kappa chain V | 5.1 | 11 | 90 | 55.6 | 8 | Host defense | control | 2 |
| | region (hybridoma | | | | | | | | |
| | NC19-E11) | | | | | | | | |
| gi\|125796 | Ig kappa chain V- | 5.2 | 12 | 73.7 | 66.7 | 6 | Host defense | down | 1 |
| | III region PC | | | | | | | regulated | |
| | 2880/PC 1229 | | | | | | | | |
| gi\|197064 | Ig kappa chain V- | 7.3 | 11.9 | 92.3 | 99.1 | 7 | Host defense | control | 1 |
| | region (V-Jk1) | | | | | | | | |
| | protein | | | | | | | | |
| gi\|1613779 | Ig kappa light | 5.5 | 23.9 | 69.6 | 38.3 | 10 | Host defense | control | 1 |
| | chain | | | | | | | | |
| gi\|284924 | Ig light chain V | 6.1 | 10.7 | 86.9 | 75.5 | 6 | Host defense | tumor | 1 |
| | region (clone | | | | | | | | |
| | 185-c1) | | | | | | | | |
| gi\|494164 | Igg2a Fab | 5.7 | 23.9 | 65.7 | 39.6 | 5 | Host defense | control | 1 |
| | Fragment (Fab | | | | | | | | |
| | 179) | | | | | | | | |
| gi\|229901 | Igg2b, Kappa | 5.8 | 23.7 | 108 | 70.1 | 12 | Host defense | control | 5 |
| gi\|62204734 | Inter alpha- | 6.1 | 104 | 220 | 37 | 29 | Unknown | | 5 |
| | trypsin inhibitor, | | | | | | | | |
| | heavy chain 4 | | | | | | | | |
| gi\|16418335 | Leucine-rich | 6 | 37.4 | 71 | 23.4 | 8 | Unknown | | 3 |
| | alpha-2- | | | | | | | | |
| | glycoprotein | | | | | | | | |
| gi\|21594125 | Lifr protein | 6.5 | 81.3 | 95.5 | 20.4 | 10 | The WSXWS motif appears to be | control | 3 |
| | (leukemia | | | | | | necessary for proper protein folding | | |
| | inhibitory factor | | | | | | and thereby efficient intracellular | | |
| | receptor) | | | | | | transport and cell-surface receptor | | |
| | | | | | | | binding | | |
| gi\|8569601 | Major urinary | 4.9 | 20.6 | 161 | 73.5 | 11 | Binds pheromones | down | 3 |
| | protein 1 | | | | | | | regulated | |
| gi\|6754654 | Mannose binding | 7.3 | 25.4 | 113 | 45.6 | 10 | Binds mannose and N− | control | 5 |
| | lectin (A) | | | | | | acetylglucosamine in a Ca++ | | |
| | | | | | | | dependent way. Is capable of host | | |
| | | | | | | | defense against pathogens, by | | |
| | | | | | | | activating the classical complement | | |
| | | | | | | | pathway independently of the | | |
| | | | | | | | antibody | | |
| gi\|233018 | Mannose binding | 4.9 | 25.9 | 160 | 49.6 | 11 | Binds mannose and N− | control | 3 |
| | protein C | | | | | | acetylglucosamine. Host defense | | |
| | | | | | | | against pathogens, by activating | | |
| | | | | | | | the complement pathway | | |
| | | | | | | | independently of the antibody. | | |
| gi\|2118830 | MHC class I | 5.1 | 37 | 240 | 53.7 | 21 | Involved in the presentation of | | 9 |
| | histocompatibility | | | | | | foreign antigens to the immune | | |
| | antigen H-2 Q10 | | | | | | system | | |
| | alpha chain | | | | | | | | |
| gi\|387437 | MHC factor B | 8.7 | 54 | 246 | 58.5 | 30 | Factor B which is part of the | tumor | 4 |
| | | | | | | | alternate pathway of the | | |
| | | | | | | | complement system is cleaved by | | |
| | | | | | | | factor D into 2 fragments: Ba and | | |
| | | | | | | | Bb. Bb, a serine protease, then | | |
| | | | | | | | combines with complement factor | | |
| | | | | | | | 3b to generate the C3 or C5 | | |
| | | | | | | | convertase | | |
| gi\|55217 | Murine valosin- | 5.1 | 89.3 | 91.6 | 19.1 | 12 | Necessary for the fragmentation of | | 1 |
| | containing | | | | | | Golgi stacks during mitosis and for | | |
| | protein | | | | | | their reassembly after mitosis. | | |
| | | | | | | | Involved in the formation of the | | |
| | | | | | | | transitional endoplasmic reticulum | | |
| | | | | | | | (tER). The transfer of membranes | | |
| | | | | | | | from the endoplasmic reticulum to | | |
| | | | | | | | the Golgi apparatus occurs via 50- | | |
| | | | | | | | 70 nm transition vesicles which | | |
| | | | | | | | derive from part-rough, part-smooth | | |
| | | | | | | | transitional elements of the | | |
| | | | | | | | endoplasmic reticulum (tER). | | |
| | | | | | | | Vesicle budding from the tER is an | | |
| | | | | | | | ATP-dependent process. The | | |
| | | | | | | | ternary complex containing UFD1L, | | |
| | | | | | | | VCP and NPL4 binds ubiquitinated | | |
| | | | | | | | proteins and is necessary for the | | |
| | | | | | | | export of misfolded proteins from | | |
| | | | | | | | the ER to the cytoplasm, where | | |
| | | | | | | | they are degraded by the | | |
| | | | | | | | proteasome. The NPL4-UFD1L- | | |
| | | | | | | | VCP complex regulates spindle | | |
| | | | | | | | disassembly at the end of mitosis | | |
| | | | | | | | and is necessary for the formation | | |
| | | | | | | | of a closed nuclear envelope | | |
| gi\|6679182 | Orosomucoid 1 | 5.4 | 23.9 | 100 | 34.8 | 10 | Appears to function in modulating | control | 4 |
| | | | | | | | the activity of the immune system | | |
| | | | | | | | during the acute-phase reaction | | |
| gi\|31982113 | Plasminogen | 6.1 | 90.8 | 449 | 61.5 | 53 | Plasmin dissolves the fibrin of | | 10 |
| | [Mus musculus] | | | | | | blood clots and acts as a | | |
| | | | | | | | proteolytic factor in a variety of | | |
| | | | | | | | other processes including | | |
| | | | | | | | embryonic development, tissue | | |
| | | | | | | | remodeling, tumor invasion, and | | |
| | | | | | | | inflammation; in ovulation it | | |
| | | | | | | | weakens the walls of the Graafian | | |
| | | | | | | | follicle. It activates the urokinase- | | |
| | | | | | | | type plasminogen activator, | | |
| | | | | | | | collagenases and several | | |
| | | | | | | | complement zymogens, such as | | |
| | | | | | | | C1 and C5. It cleaves fibrin, | | |
| | | | | | | | fibronectin, thrombospondin, | | |
| | | | | | | | laminin and von Willebrand factor. | | |
| | | | | | | | Its role in tissue remodeling and | | |
| | | | | | | | tumor invasion may be modulated | | |
| | | | | | | | by CSPG4 | | |
| gi\|2144495 | PLMS plasmin | 6 | 90.8 | 352 | 51.4 | 38 | Plasmin dissolves the fibrin of | n.v.o. | 8 |
| | | | | | | | blood clots and acts as a | | |
| | | | | | | | proteolytic factor in a variety of | | |
| | | | | | | | other processes including | | |
| | | | | | | | embryonic development, tissue | | |
| | | | | | | | remodeling, tumor invasion, and | | |
| | | | | | | | inflammation; in ovulation it | | |
| | | | | | | | weakens the walls of the Graafian | | |
| | | | | | | | follicle. It activates the urokinase- | | |
| | | | | | | | type plasminogen activator, | | |
| | | | | | | | collagenases and several | | |
| | | | | | | | complement zymogens, such as | | |
| | | | | | | | C1 and C5. It cleaves fibrin, | | |
| | | | | | | | fibronectin, thrombospondin, | | |
| | | | | | | | laminin and von Willebrand factor. | | |
| | | | | | | | Its role in tissue remodeling and | | |
| | | | | | | | tumor invasion may be modulated | | |
| | | | | | | | by CSPG4 | | |
| gi\|6680608 | Pregnancy zone | 6.2 | 165.8 | 113 | 13.7 | 14 | Endopeptidase inhibitor activity | | 8 |
| | protein | | | | | | | | |
| gi\|53787 | Properdin | 8.4 | 47.5 | 143 | 32.5 | 16 | A positive regulator of the alternate | up | 6 |
| | (AA 5-441) | | | | | | pathway of complement. It binds to | regulated | |
| | | | | | | | and stabilizes the C3-and C5- | | |
| | | | | | | | convertase enzyme complexes. | | |
| gi\|49868 | Put. beta-actin | 5.7 | 39.2 | 136 | 44.4 | 16 | Involved in various types of cell | | 1 |
| | (aa 27-375) | | | | | | motility. | | |
| gi\|34785996 | Pzp protein | 6.2 | 165.9 | 187 | 28.2 | 32 | Unknown | up | 14 |
| | | | | | | | | regulated | |
| gi\|33859612 | Retinol binding | 5.6 | 23.2 | 147 | 51.7 | 14 | Delivers retinol from the liver stores | | 9 |
| | protein 4 | | | | | | to the peripheral tissues. In plasma, | | |
| | | | | | | | the RBP-retinol complex interacts | | |
| | | | | | | | with transthyretin, this prevents its | | |
| | | | | | | | loss by filtration through the kidney | | |
| | | | | | | | glomeruli. | | |
| gi\|6678083 | Serine (or | 5.3 | 45.9 | 149 | 62.7 | 20 | Inhibitor of serine proteases. Can | | 6 |
| | cysteine) | | | | | | inhibit trypsin and chymotrypsin; | | |
| | proteinase | | | | | | relatively ineffective against | | |
| | inhibitor, clade A, | | | | | | elastase | | |
| | member 1a | | | | | | | | |
| gi\|15029662 | Serine (or | 5.3 | 46 | 143 | 51.6 | 17 | Inhibitor of serine proteases. Its | | 8 |
| | cysteine) | | | | | | primary target is elastase, but it | | |
| | proteinase | | | | | | also has a moderate affinity for | | |
| | inhibitor, clade A, | | | | | | plasmin and thrombin. | | |
| | member 1a | | | | | | | | |
| gi\|6678085 | Serine (or | 5.2 | 46 | 171 | 47 | 14 | Inhibitor of serine proteases. Can | | 1 |
| | cysteine) | | | | | | inhibit trypsin and chymotrypsin; | | |
| | proteinase | | | | | | relatively ineffective against | | |
| | inhibitor, clade A, | | | | | | elastase | | |
| | member 1d | | | | | | | | |
| gi\|6678087 | Serine (or | 5.4 | 45.9 | 154 | 41.6 | 19 | Does not inhibit elastase or | | 5 |
| | cysteine) | | | | | | chymotrypsin. No target protease | | |
| | proteinase | | | | | | has been identified to date | | |
| | inhibitor, clade A, | | | | | | | | |
| | member 1e | | | | | | | | |
| gi\|18044689 | Serine (or | 5 | 46.9 | 99.1 | 40 | 13 | serine-type endopeptidase inhibitor | | 1 |
| | cysteine) | | | | | | activity | | |
| | proteinase | | | | | | | | |
| | inhibitor, clade A, | | | | | | | | |
| | member 3K | | | | | | | | |
| gi\|18252782 | Serine (or | 6.1 | 52 | 195 | 61.7 | 25 | Most important serine protease | | 7 |
| | cysteine) | | | | | | inhibitor in plasma that regulates | | |
| | proteinase | | | | | | the blood coagulation cascade. AT- | | |
| | inhibitor, clade C | | | | | | III inhibits thrombin as well as | | |
| | (antithrombin), | | | | | | factors IXa, Xa, and XIa. Its | | |
| | member 1 | | | | | | inhibitory activity is greatly | | |
| | | | | | | | enhanced in the presence of | | |
| | | | | | | | heparin. | | |
| gi\|6679383 | Serine (or | 5.8 | 54.9 | 106 | 34.6 | 17 | Serine-type endopeptidase inhibitor | up | 5 |
| | cysteine) | | | | | | activity | regulated | |
| | proteinase | | | | | | | | |
| | inhibitor, clade F, | | | | | | | | |
| | member 2 | | | | | | | | |
| gi\|15929675 | Serpina1a protein | 5.4 | 45.6 | 219 | 62 | 23 | Inhibitor of serine proteases. Can | | 12 |
| | | | | | | | inhibit trypsin and chymotrypsin; | | |
| | | | | | | | relatively ineffective against | | |
| | | | | | | | elastase. | | |
| gi\|14602605 | Serpina1a protein | 5.3 | 46 | 224 | 62 | 24 | Inhibitor of serine proteases. Can | | 7 |
| | | | | | | | inhibit trypsin and chymotrypsin; | | |
| | | | | | | | relatively ineffective against | | |
| | | | | | | | elastase. | | |
| gi\|38174334 | Serum amyloid | 6.2 | 26.2 | 122 | 37.5 | 9 | Unknown | up | 7 |
| | P-component | | | | | | | regulated | |
| gi\|20330802 | Transferrin | 6.8 | 76.7 | 159 | 40 | 47 | Transferrins are iron binding | | 13 |
| | | | | | | | transport proteins which can bind | | |
| | | | | | | | two Fe(3+) ions in associations with | | |
| | | | | | | | the binding of an anion, usually | | |
| | | | | | | | bicarbonate. It is responsible for | | |
| | | | | | | | the transport of iron from sites of | | |
| | | | | | | | absorption and heme degradation | | |
| | | | | | | | to those of storage and utilization. | | |
| | | | | | | | Serum transferrin may also have a | | |
| | | | | | | | further role in stimulating cell | | |
| | | | | | | | proliferation. | | |
| gi\|19354093 | Transthyretin | 5.5 | 15.8 | 155 | 96.6 | 11 | Thyroid hormone-binding protein. | | 8 |
| | | | | | | | Probably transports thyroxine from | | |
| | | | | | | | the bloodstream to the brain. | | |
| gi\|111243 | Vitamin D- | 5.2 | 53.1 | 288 | 65.3 | 30 | Multifunction | | 12 |
| | binding protein | | | | | | | | |
| gi\|1083568 | Zinc-alpha 2- | 5.7 | 33.5 | 94.6 | 40 | 10 | Stimulates lipid degradation in | | 1 |
| | glycoprotein | | | | | | adipocytes and causes the | | |
| | | | | | | | extensive fat losses associated | | |
| | | | | | | | with some advanced cancers | | |

SUPPLEMENTARY TABLE 2

| NCBI Number | Protein | Identified Peptides |
|---|---|---|
| gi\|15277503 | ACTB protein | AGFAGDDAPR |
| | | (SEQ ID NO 3) |
| | | AVFPSIVGRPR |
| | | (SEQ ID NO 4) |
| | | DLYANTVLSGGTTMYPGIADR |
| | | (SEQ ID NO 5) |
| | | DSYVGDEAQSKR |
| | | (SEQ ID NO 6) |
| | | GYSFTTTAER |
| | | (SEQ ID NO 7) |
| | | GYSFTTTAEREIVR |
| | | (SEQ ID NO 8) |
| | | HQGVMVGMGQK ox ox |
| | | (SEQ ID NO 9) |
| | | HQGVMVGMGQKDSYVGDEAQSK ox ox |
| | | (SEQ ID NO 10) |
| | | IIAPPERK |
| | | (SEQ ID NO 11) |
| | | IKIIAPPER |
| | | (SEQ ID NO 12) |
| | | ILTERGYSFTTTAER |
| | | (SEQ ID NO 13) |
| | | IWHHTFYNELR |
| | | (SEQ ID NO 14) |
| | | KDLYANTVLSGGTTMYPGIADR ox |
| | | (SEQ ID NO 15) |
| | | LCYVALDFEQEMATAASSSSLEK cam ox |
| | | (SEQ ID NO 16) |
| | | LDLAGRDLTDYLMK |
| | | (SEQ ID NO 17) |
| | | LDLAGRDLTDYLMK ox |
| | | (SEQ ID NO 18) |
| | | QEYDESGPSIVHR |
| | | (SEQ ID NO 19) |
| | | QEYDESGPSIVHRK |
| | | (SEQ ID NO 20) |
| | | SYELPDGQVITIGNER |
| | | (SEQ ID NO 21) |
| | | TTGIVMDSGDGVTHTVPIYEGYALPHAILR ox |
| | | (SEQ ID NO 22) |
| | | VAPEEHPVLLTEAPLNPK |
| | | (SEQ ID NO 23) |
| gi\|71621 | Actin beta | AGFAGDDAPR |
| | | (SEQ ID NO 24) |
| | | AVFPSIVGRPR |
| | | (SEQ ID NO 25) |
| | | DDDIAALVVDNGSGMCK ox cam |
| | | (SEQ ID NO 26) |
| | | DLYANTVLSGGTTMYPGIADR ox |
| | | (SEQ ID NO 27) |
| | | DSYVGDEAQSKR |
| | | (SEQ ID NO 28) |
| | | EITALAPSTMK ox |
| | | (SEQ ID NO 29) |
| | | GYSFTTTAER |
| | | (SEQ ID NO 30) |
| | | GYSFTTTAEREIVR |
| | | (SEQ ID NO 31) |
| | | HQGVMVGMGQK ox |
| | | (SEQ ID NO 32) |
| | | IIAPPERK |
| | | (SEQ ID NO 33) |
| | | IKIIAPPER |
| | | (SEQ ID NO 34) |
| | | IWHHTFYNELR |
| | | (SEQ ID NO 35) |
| | | KDLYANTVLSGGTTMYPGIADR ox |
| | | (SEQ ID NO 36) |
| | | LCYVALDFEQEMATAASSSSLEK cam ox |
| | | (SEQ ID NO 37) |
| | | LDLAGRDLTDYLMK ox |
| | | (SEQ ID NO 38) |
| | | QEYDESGPSIVHR |
| | | (SEQ ID NO 39) |
| | | QEYDESGPSIVHRK |
| | | (SEQ ID NO 40) |
| | | SYELPDGQVITIGNER |
| | | (SEQ ID NO 41) |
| | | TTGIVMDSGDGVTHTVPIYEGYALPHAILR ox |
| | | (SEQ ID NO 42) |
| | | VAPEEHPVLLTEAPLNPK |
| | | (SEQ ID NO 43) |
| gi\|21553101 | Afamin | AAPQLPMEELVSLSK |
| | | (SEQ ID NO 44) |
| | | ANVGFLPPFPTLDPEEK |
| | | (SEQ ID NO 45) |
| | | SLAMVQQECNQFQELGKDTLQR ox cam |
| | | (SEQ ID NO 46) |
| | | CWADNTLPECSK cam cam |
| | | (SEQ ID NO 47) |
| | | DRCWADNTLPECSK cam cam |
| | | (SEQ ID NO 48) |
| | | DSDPDKFFAEFIYEYSR |
| | | (SEQ ID NO 49) |
| | | EACIINANKDDRPEGLSLR cam |
| | | (SEQ ID NO 50) |
| | | FTAAREECSEVQEPESCFSPESSK cam cam |
| | | (SEQ ID NO 51) |
| | | FTESENVCQER cam |
| | | (SEQ ID NO 52) |
| | | HFLVKFTK |
| | | (SEQ ID NO 53) |
| | | IGFKDLTTLLEDVSSMYEGCCEGDVVHCIR cam cam |
| | | cam |
| | | (SEQ ID NO 54) |
| | | KANVGFLPPFPTLDPEEK |
| | | (SEQ ID NO 55) |
| | | RLCFFYNK cam |
| | | (SEQ ID NO 56) |
| | | TINPAVDHCCK cam cam |
| | | (SEQ ID NO 57) |
| | | TINPAVDHCCKTDFAFR cam cam |
| | | (SEQ ID NO 58) |
| | | VLNSINVAVFSK |
| | | (SEQ ID NO 59) |
| | | VMLDYRDR |
| | | (SEQ ID NO 60) |
| | | VMLDYRDR ox |
| | | (SEQ ID NO 61) |
| | | VYMDFLEDCCSR ox cam cam |
| | | (SEQ ID NO 62) |
| gi\|20072386 | Afm protein | ANVGFLPPFPTLDPEEK |
| | | (SEQ ID NO 63) |
| | | ASSSYQRNVCGALIK cam |
| | | (SEQ ID NO 64) |
| | | ATCFQAKAAPITQYLK cam |
| | | (SEQ ID NO 65) |
| | | CWADNTLPECSK cam cam |
| | | (SEQ ID NO 66) |
| | | DDRPEGLSLREAK |
| | | (SEQ ID NO 67) |
| | | DSDPDKFFAEFIYEYSR |
| | | (SEQ ID NO 68) |
| | | EACIINANKDDRPEGLSLR cam |
| | | (SEQ ID NO 69) |
| | | EAKFTESENVCQER cam |
| | | (SEQ ID NO 70) |
| | | FTESENVCQER cam |
| | | (SEQ ID NO 71) |
| | | ITKVYMDFLEDCCSR ox cam cam |
| | | (SEQ ID NO 72) |
| | | KANVGFLPPFPTLDPEEK |
| | | (SEQ ID NO 73) |
| | | LCFFYNKK cam |
| | | (SEQ ID NO 74) |
| | | NVCGALIKFGPK cam |
| | | (SEQ ID NO 75) |
| | | QFQELGKDTLQR |
| | | (SEQ ID NO 76) |
| | | RHPDLSTPELLR |
| | | (SEQ ID NO 77) |
| | | SLAMVQQECK ox cam |
| | | (SEQ ID NO 78) |
| | | SQSQVVNHICSK cam |
| | | (SEQ ID NO 79) |
| | | SQSQVVNHICSKQDSISSK cam |
| | | (SEQ ID NO 80) |
| | | VLNSINVAVFSK |
| | | (SEQ ID NO 81) |
| | | VMLDYRDR |
| | | VYMDFLEDCCSR ox cam cam |
| | | (SEQ ID NO 83) |
| gi\|11277085 | Albumin (fragment) | AETFTFHSDICTLPEKEK cam |
| | | (SEQ ID NO 84) |
| | | APQVSTPTLVEAAR |
| | | (SEQ ID NO 85) |
| | | CCAEANPPACYGTVLAEFQPLVEEPK cam cam cam |
| | | (SEQ ID NO 86) |
| | | CCAEANPPACYGTVLAEFQPLVEEPKNLVK cam |
| | | cam cam |
| | | (SEQ ID NO 87) |
| | | CCSGSLVER cam cam |
| | | (SEQ ID NO 88) |
| | | CCTLPEDQRLPCVEDYLSAILNR cam cam cam |
| | | (SEQ ID NO 89) |
| | | DVFLGTFLYEYSR |
| | | (SEQ ID NO 90) |
| | | ENPTTFMGHYLHEVAR |
| | | (SEQ ID NO 91) |
| | | HPDYSVSLLLR |
| | | (SEQ ID NO 92) |
| | | LGEYGFQNAILVR |
| | | (SEQ ID NO 93) |
| | | LPCVEDYLSAILNR cam |
| | | (SEQ ID NO 94) |
| | | LQTCCDKPLLK cam cam |
| | | (SEQ ID NO 95) |
| | | LQTCCDKPLLKK cam cam |
| | | (SEQ ID NO 96) |
| | | LSQTFPNADFAEITK |
| | | (SEQ ID NO 97) |
| | | LSQTFPNADFAEITKLATDLTK |
| | | (SEQ ID NO 98) |
| | | NYAEAKDVFLGTFLYEYSR |
| | | (SEQ ID NO 99) |
| | | QEPERNECFLQHK cam |
| | | (SEQ ID NO 100) |
| | | RHPDYSVSLLLR |
| | | (SEQ ID NO 101) |
| | | RPCFSALTVDETYVPK cam |
| | | (SEQ ID NO 102) |
| | | TNCDLYEKLGEYGFQNAILVR cam |
| | | (SEQ ID NO 103) |
| | | VCLLHEKTPVSEHVTK cam |
| | | (SEQ ID NO 104) |
| | | YMCENQATISSK cam |
| | | (SEQ ID NO 105) |
| | | YTQKAPQVSTPTLVEAAR |
| | | (SEQ ID NO 106) |
| gi\|33859506 | Albumin 1 | SEIAHRYNDLGEQHFK |
| | | (SEQ ID NO 107) |
| | | AETFTFHSDICTLPEKEK cam |
| | | (SEQ ID NO 108) |
| | | AFKAWAVAR |
| | | (SEQ ID NO 109) |
| | | AHCLSEVEHDTMPADLPAIAADFVEDQEVCK cam ox |
| | | cam |
| | | (SEQ ID NO 110) |
| | | APQVSTPTLVEAAR |
| | | (SEQ ID NO 111) |
| | | APQVSTPTLVEAARNLGR |
| | | (SEQ ID NO 112) |
| | | CCAEANPPACYGTVLAEFQPLVEEPK cam cam cam |
| | | (SEQ ID NO 113) |
| | | CCSGSLVER cam cam |
| | | (SEQ ID NO 114) |
| | | CCTLPEDQR cam cam |
| | | (SEQ ID NO 115) |
| | | CCTLPEDQRLPCVEDYLSAILNR cam cam cam |
| | | (SEQ ID NO 116) |
| | | DDNPSLPPFERPEAEAMCTSFK ox cam |
| | | (SEQ ID NO 117) |
| | | DVFLGTFLYEYSR |
| | | (SEQ ID NO 118) |
| | | DVFLGTFLYEYSRR |
| | | (SEQ ID NO 119) |
| | | EAHKSEIAHR |
| | | (SEQ ID NO 120) |
| | | ECCHGDLLECADDRAELAK cam cam cam |
| | | (SEQ ID NO 121) |
| | | EFKAETFTFHSDICTLPEK cam |
| | | (SEQ ID NO 122) |
| | | ENPTTFMGHYLHEVAR ox |
| | | (SEQ ID NO 123) |
| | | ENYGELADCCTK cam cam |
| | | (SEQ ID NO 124) |
| | | HPDYSVSLLLR |
| | | (SEQ ID NO 125) |
| | | LCAIPNLRENYGELADCCTK cam cam cam |
| | | (SEQ ID NO 126) |
| | | LGEYGFQNAILVR |
| | | (SEQ ID NO 127) |
| | | LPCVEDYLSAILNR cam |
| | | (SEQ ID NO 128) |
| | | LQTCCDKPLLK cam cam |
| | | (SEQ ID NO 129) |
| | | LQTCCDKPLLKK cam cam |
| | | (SEQ ID NO 130) |
| | | LSQTFPNADFAEITK |
| | | (SEQ ID NO 131) |
| | | LVQEVTDFAK |
| | | (SEQ ID NO 132) |
| | | QEPERNECFLQHK cam |
| | | (SEQ ID NO 133) |
| | | RHPDYSVSLLLR |
| | | (SEQ ID NO 134) |
| | | RPCFSALTVDETYVPK cam |
| | | (SEQ ID NO 135) |
| | | RPCFSALTVDETYVPKEFK cam |
| | | (SEQ ID NO 136) |
| | | SLHTLFGDKLCAIPNLR cam |
| | | (SEQ ID NO 137) |
| | | TNCDLYEKLGEYGFQNAILVR cam |
| | | (SEQ ID NO 138) |
| | | TVMDDFAQFLDTCCK cam cam |
| | | (SEQ ID NO 139) |
| | | YMCENQATISSK ox cam |
| | | (SEQ ID NO 140) |
| | | YNDLGEQHFK |
| | | (SEQ ID NO 141) |
| | | YNDLGEQHFKGLVLIAFSQYLQK |
| | | (SEQ ID NO 142) |
| | | YTQKAPQVSTPTLVEAAR |
| | | (SEQ ID NO 143) |
| gi\|42542817 | Alpha fetoprotein | ALQTMKQELLINLVK |
| | | (SEQ ID NO 144) |
| | | AQDQEVCFTEEGPK cam |
| | | (SEQ ID NO 145) |
| | | AQDQEVCFTEEGPKLISK cam |
| | | (SEQ ID NO 146) |
| | | CSQSGNLPGCQDNLEEELQK cam cam |
| | | (SEQ ID NO 147) |
| | | CSQSGNLPGCQDNLEEELQKHIEESQALSK cam |
| | | cam |
| | | (SEQ ID NO 148) |
| | | DETYAPPPFSEDK |
| | | (SEQ ID NO 149) |
| | | EGSMLNEHVCSVIR cam |
| | | (SEQ ID NO 150) |
| | | ELREGSMLNEHVCSVIR ox cam |
| | | (SEQ ID NO 151) |
| | | FIYEVSRR |
| | | (SEQ ID NO 152) |
| | | LQNLFLIGYTR |
| | | (SEQ ID NO 153) |
| | | NPFMYAPAILSLAAQYDK ox |
| | | (SEQ ID NO 154) |
| | | NSGDGCLESQLSVFLDEICHETELSNK cam cam |
| | | (SEQ ID NO 155) |
| | | QKPELTEEQLAAVTADFSGLLEK |
| | | (SEQ ID NO 156) |
| | | QSCALYQTLGDYKLQNLFLIGYTR cam |
| | | (SEQ ID NO 157) |
| | | TAPASVPPFQFPEPAESCK cam |
| | | (SEQ ID NO 158) |
| | | TAPASVPPFQFPEPAESCKAHEENR cam |
| | | (SEQ ID NO 159) |
| | | THPNLPVSVILR |
| | | (SEQ ID NO 160) |
| | | VMTYICSQQNILSSK cam |
| | | (SEQ ID NO 161) |
| | | YGLSGCCSQSGVER cam cam |
| | | (SEQ ID NO 162) |
| gi\|191765 | Alpha fetoprotein | APQVSTPTLVEAAR |
| | | (SEQ ID NO 163) |
| | | CCSGSLVER cam cam |
| | | (SEQ ID NO 164) |
| | | CCTLPEDQRLPCVEDYLSAILNR cam cam cam |
| | | (SEQ ID NO 165) |
| | | DVFLGTFLYEYSR |
| | | (SEQ ID NO 166) |
| | | HPDYSVSLLLR |
| | | (SEQ ID NO 167) |
| | | LGEYGFQNAILVR |
| | | (SEQ ID NO 168) |
| | | LPCVEDYLSAILNR cam |
| | | (SEQ ID NO 169) |
| | | LQTCCDKPLLK cam cam |
| | | (SEQ ID NO 170) |
| | | LQTCCDKPLLKK cam cam |
| | | (SEQ ID NO 171) |
| | | LSQTFPNADFAEITK |
| | | (SEQ ID NO 172) |
| | | LSQTFPNADFAEITKLATDLTK |
| | | (SEQ ID NO 173) |
| | | NYAEAKDVFLGTFLYEYSR |
| | | (SEQ ID NO 174) |
| | | RHPDYSVSLLLR |
| | | (SEQ ID NO 175) |
| | | TNCDLYEKLGEYGFQNAILVR cam |
| | | (SEQ ID NO 176) |
| | | VCLLHEKTPVSEHVTK cam |
| | | (SEQ ID NO 177) |
| | | YMCENQATISSK ox cam |
| | | (SEQ ID NO 178) |
| | | YTQKAPQVSTPTLVEAAR |
| | | (SEQ ID NO 179) |
| gi\|191844 | Alpha-1 protease | AVLTIDETGTEAAAATVFEAVPMSMPPILR |
| | inhibitor 2 | (SEQ ID NO 180) |
| | | DQSPASHEIATNLGDFAISLYR |
| | | (SEQ ID NO 181) |
| | | FDHPFLFIIFEEHTQSPIFVGK |
| | | (SEQ ID NO 182) |
| | | FLEEAKNHYQAEVFSVNFAESEEAK |
| | | (SEQ ID NO 183) |
| | | IFNNGADLSGITEENAPLK |
| | | (SEQ ID NO 184) |
| | | IFNNGADLSGITEENAPLKLSK |
| | | (SEQ ID NO 185) |
| | | IVEAVKELDQDTVFALANYILFK |
| | | (SEQ ID NO 186) |
| | | KPFDPENTEEAEFHVDK |
| | | (SEQ ID NO 187) |
| | | KVINDFVEK |
| | | (SEQ ID NO 188) |
| | | LSISGDYNLK |
| | | (SEQ ID NO 189) |
| | | LSISGDYNLKTLMSPLGITR |
| | | (SEQ ID NO 190) |
| | | MQHLEQTLNK |
| | | (SEQ ID NO 191) |
| | | MQHLEQTLNKELISK |
| | | (SEQ ID NO 192) |
| | | NHYQAEVFSVNFAESEEAK |
| | | (SEQ ID NO 193) |
| | | NHYQAEVFSVNFAESEEAKK |
| | | (SEQ ID NO 194) |
| | | SFQHLLQTLNRPDSELQLSTGNGLFVNNDLK |
| | | (SEQ ID NO 195) |
| | | TLMSPLGITR |
| | | (SEQ ID NO 196) |
| | | VINDFVEKGTQGK |
| | | (SEQ ID NO 197) |
| | | WKKPFDPENTEEAEFHVDK |
| | | (SEQ ID NO 198) |
| gi\|31982171 | Alpha-2 | ADSHFRHGIPFFVK |
| | macroglobulin MUG1 | (SEQ ID NO 199) |
| | | AHFSVMGDILSSAIR |
| | | (SEQ ID NO 200) |
| | | ALMAYAFALAGNQNK |
| | | (SEQ ID NO 201) |
| | | ALMAYAFALAGNQNKR ox |
| | | (SEQ ID NO 202) |
| | | ALSCLESSWK cam |
| | | (SEQ ID NO 203) |
| | | DGSYSAFGDQNGER |
| | | (SEQ ID NO 204) |
| | | EGNTWLTAFVLK |
| | | (SEQ ID NO 205) |
| | | ESGEKEEHSFTVMEFVLPR |
| | | (SEQ ID NO 206) |
| | | ESVVFVQTDKPVYKPGQSVK |
| | | (SEQ ID NO 207) |
| | | FALEIPVEFSMVPMAK ox ox |
| | | (SEQ ID NO 208) |
| | | FSTSQSLPASQTR |
| | | (SEQ ID NO 209) |
| | | HTNLVPHGTEKDVYR |
| | | (SEQ ID NO 210) |
| | | HTSSWLVTPK |
| | | (SEQ ID NO 211) |
| | | HVAYAVYSLSK |
| | | (SEQ ID NO 212) |
| | | LPIICFDYGMVPISAPR cam ox |
| | | (SEQ ID NO 213) |
| | | LQVTASPQSLCGLR cam |
| | | (SEQ ID NO 214) |
| | | LSEDQEDCILYSSWLAEK cam |
| | | (SEQ ID NO 215) |
| | | LSSSDEEDFLYVDIKGPTHEFSK |
| | | (SEQ ID NO 216) |
| | | LVDIKGDPIPNEK |
| | | (SEQ ID NO 217) |
| | | MLRPLNELLPLAYIEDPKK |
| | | (SEQ ID NO 218) |
| | | MLSGFIPLKPTVK |
| | | (SEQ ID NO 219) |
| | | MSLVLPPTVVK |
| | | (SEQ ID NO 220) |
| | | MSLVLPPTVVKDSAR |
| | | (SEQ ID NO 221) |
| | | NKESVVFVQTDKPVYKPGQSVK |
| | | (SEQ ID NO 222) |
| | | NLFDELVLDKDLFQCVSFIIPR cam |
| | | (SEQ ID NO 223) |
| | | QMSFSLAAEPIQGPYK ox |
| | | (SEQ ID NO 224) |
| | | QQNSNGGFSSTQDTVVALDALSK |
| | | (SEQ ID NO 225) |
| | | SLDEEAIKENNSIHWK |
| | | (SEQ ID NO 226) |
| | | SQKTTLVTIQSTGSFSQK |
| | | (SEQ ID NO 227) |
| | | TTLVTIQSTGSFSQK |
| | | (SEQ ID NO 228) |
| | | YTYGKPVPGHVK |
| | | (SEQ ID NO 229) |
| gi\|7304875 | Alpha-2-HS- | ANLMHNLGGEEVSVACK cam |
| | glycoprotein (Fetuin) | (SEQ ID NO 230) |
| | | AQNVPLPVSTLVEFVIAATDCTAK cam |
| | | (SEQ ID NO 231) |
| | | CNLLAEK |
| | | (SEQ ID NO 232) |
| | | CNLLAEKQHGFCK cam cam |
| | | (SEQ ID NO 233) |
| | | ELACDDPEAEQVALLAVDYLNNHLLQGFK cam |
| | | (SEQ ID NO 234) |
| | | EVTDPAKCNLLAEK cam |
| | | (SEQ ID NO 235) |
| | | HAFSPVASVESASGETLHSPK |
| | | (SEQ ID NO 236) |
| | | QLTEHAVEGDCDFHILK cam |
| | | (SEQ ID NO 237) |
| | | QLTEHAVEGDCDFHILKQDGQFR cam |
| | | (SEQ ID NO 238) |
| | | QVLNQIDK |
| | | (SEQ ID NO 239) |
| | | QVLNQIDKVK |
| | | (SEQ ID NO 240) |
| | | TYHDLR |
| | | (SEQ ID NO 241) |
| | | VGQPGAAGPVSPMCPGR cam |
| | | (SEQ ID NO 242) |
| gi\|14318646 | Amylase 1, salivary | AHFSISNSAEDPFIAIHAESKI |
| | | (SEQ ID NO 243) |
| | | AILDKLHNLNTK |
| | | (SEQ ID NO 244) |
| | | ALVFVDNHDNQR |
| | | (SEQ ID NO 245) |
| | | DFPGVPYSGFDFNDGK |
| | | (SEQ ID NO 246) |
| | | GHGAGGASILTFWDAR |
| | | (SEQ ID NO 247) |
| | | LSGLLDLALEKDYVR |
| | | (SEQ ID NO 248) |
| | | NWGEGWGLMPSDR ox |
| | | (SEQ ID NO 249) |
| | | SGNEDEFRDMVNR |
| | | (SEQ ID NO 250) |
| | | TAIVHLFEWR |
| | | (SEQ ID NO 251) |
| | | TASGGIENYQDAAQVR |
| | | (SEQ ID NO 252) |
| | | VADYMNHLIDIGVAGFR ox |
| | | (SEQ ID NO 253) |
| | | VMSSYYWPR |
| | | (SEQ ID NO 254) |
| | | WVDIAKECER cam |
| | | (SEQ ID NO 255) |
| gi\|425520 | Anti-colorectal | ADAAPTVSIFPPSSEQLTSGGASVVCFLNNFYPK |
| | carcinoma light chain | cam |
| | | (SEQ ID NO 256) |
| | | ASQDINSYLSWFQQKPGK |
| | | (SEQ ID NO 257) |
| | | HNSYTCEATHK cam |
| | | (SEQ ID NO 258) |
| | | MTQSPSSMYASLGER ox |
| | | (SEQ ID NO 259) |
| | | RADAAPTVSIFPPSSEQLTSGGASVVCFLNNFYPK |
| | | cam |
| | | (SEQ ID NO 260) |
| | | TPAQFLGILLLWFPGMK ox |
| | | (SEQ ID NO 261) |
| gi\|26345182 | Apolipoprotein A1 | ARPALEDLR |
| | (Unnamed protein | (SEQ ID NO 262) |
| | product) | DFANVYVDAVKDSGR |
| | | (SEQ ID NO 263) |
| | | DFWDNLEKETDWVR |
| | | (SEQ ID NO 264) |
| | | HSLMPMLETLK ox |
| | | (SEQ ID NO 265) |
| | | LAELKSNPTLNEYHTR |
| | | (SEQ ID NO 266) |
| | | LSPVAEEFRDR |
| | | (SEQ ID NO 267) |
| | | MRTHVDSLR |
| | | (SEQ ID NO 268) |
| | | QKLQELQGR |
| | | (SEQ ID NO 269) |
| | | QKVQPYLDEFQK |
| | | (SEQ ID NO 270) |
| | | SNPTLNEYHTR |
| | | (SEQ ID NO 271) |
| | | TQLAPHSEQMR |
| | | (SEQ ID NO 272) |
| | | TQLAPHSEQMRESLAQR ox |
| | | (SEQ ID NO 273) |
| | | TQVQSVIDKASETLTAQ |
| | | (SEQ ID NO 274) |
| | | VAPLGAELQESARQK |
| | | (SEQ ID NO 275) |
| | | VKDFANVYVDAVK |
| | | (SEQ ID NO 276) |
| | | VQPYLDEFQK |
| | | (SEQ ID NO 277) |
| | | VQPYLDEFQKK |
| | | (SEQ ID NO 278) |
| | | WKEDVELYR |
| | | (SEQ ID NO 279) |
| gi\|14789706 | Apolipoprotein A4 | ALVQQLEQFR |
| | | (SEQ ID NO 280) |
| | | ALVQQLEQFRQQLGPNSGEVESHLSFLEK |
| | | (SEQ ID NO 281) |
| | | ATIDQNLEDLRR |
| | | (SEQ ID NO 282) |
| | | EAVEQFQKTDVTQQLSTLFQDK |
| | | (SEQ ID NO 283) |
| | | EKVNSFMSTLEK |
| | | (SEQ ID NO 284) |
| | | FLKAAVLTLALVAITGTR |
| | | (SEQ ID NO 285) |
| | | GSPDQPQALPLPEQAQEQAQEQAQEQVQPKPLES |
| | | (SEQ ID NO 286) |
| | | LGDASTYADGVHNK |
| | | (SEQ ID NO 287) |
| | | LNHQMEGLAFQMK |
| | | (SEQ ID NO 288) |
| | | LNHQMEGLAFQMKK |
| | | (SEQ ID NO 289) |
| | | LQEHLKPYAVDLQDQINTQTQEMK |
| | | (SEQ ID NO 290) |
| | | LQLTPYIQR |
| | | (SEQ ID NO 291) |
| | | LVPFVVQLSGHLAQETER |
| | | (SEQ ID NO 292) |
| | | MMPHANKVTQTFGENMQK ox |
| | | (SEQ ID NO 293) |
| | | NLAPLVEDVQSK |
| | | (SEQ ID NO 294) |
| | | NMEELKGHLTPR |
| | | (SEQ ID NO 295) |
| | | QLEQQVEEFRR |
| | | (SEQ ID NO 296) |
| | | QQLGPNSGEVESHLSFLEK |
| | | (SEQ ID NO 297) |
| | | SLAPLTVGVQEK |
| | | (SEQ ID NO 298) |
| | | SLAPLTVGVQEKLNHQMEGLAFQMK |
| | | (SEQ ID NO 299) |
| | | TDVTQQLSTLFQDK |
| | | (SEQ ID NO 300) |
| | | TDVTQQLSTLFQDKLGDASTYADGVHNK |
| | | (SEQ ID NO 301 |
| | | TVEPMGEMFNK |
| | | (SEQ ID NO 302) |
| | | VKGNTEGLQK |
| | | (SEQ ID NO 303) |
| | | VNSFMSTLEK |
| | | (SEQ ID NO 304) |
| gi\|6753096 | Apolipoprotein A-I | AQSVIDKASETLTAQ |
| | | (SEQ ID NO 305) |
| | | ARPALEDLR |
| | | (SEQ ID NO 306) |
| | | DFANVYVDAVK |
| | | (SEQ ID NO 307) |
| | | DFWDNLEKETDWVR |
| | | (SEQ ID NO 308) |
| | | HSLMPMLETLK ox ox |
| | | (SEQ ID NO 309) |
| | | LAELKSNPTLNEYHTR |
| | | (SEQ ID NO 310) |
| | | LQELQGR |
| | | (SEQ ID NO 311) |
| | | LSPVAEEFR |
| | | (SEQ ID NO 312) |
| | | LSPVAEEFRDR |
| | | (SEQ ID NO 313) |
| | | MRTHVDSLR ox |
| | | (SEQ ID NO 314) |
| | | QEMNKDLEEVK ox |
| | | (SEQ ID NO 315) |
| | | QKLQELQGR |
| | | (SEQ ID NO 316) |
| | | THVDSLR |
| | | (SEQ ID NO 317) |
| | | TQLAPHSEQMR |
| | | (SEQ ID NO 318) |
| | | TQLAPHSEQMRESLAQR ox |
| | | (SEQ ID NO 319) |
| | | VAPLGAELQESARQK |
| | | (SEQ ID NO 320) |
| | | VKDFANVYVDAVK |
| | | (SEQ ID NO 321) |
| | | VQPYLDEFQK |
| | | (SEQ ID NO 322) |
| | | VQPYLDEFQKK |
| | | (SEQ ID NO 323) |
| | | WKEDVELYR |
| | | (SEQ ID NO 324) |
| gi\|6753102 | Apolipoprotein E | AQAFGDRIR |
| | | (SEQ ID NO 325) |
| | | EHMEEVRSK |
| | | (SEQ ID NO 326) |
| | | ELEEQLGPVAEETR |
| | | (SEQ ID NO 327) |
| | | ELEEQLGPVAEETRAR |
| | | (SEQ ID NO 328) |
| | | ERLGPLVEQGR |
| | | (SEQ ID NO 329) |
| | | GRLEEVGNQAR |
| | | (SEQ ID NO 330) |
| | | GWFEPIVEDMHR ox |
| | | (SEQ ID NO 331) |
| | | LGADMEDLRNR |
| | | (SEQ ID NO 332) |
| | | LGKEVQAAQAR |
| | | (SEQ ID NO 333) |
| | | LGPLVEQGRQR |
| | | (SEQ ID NO 334) |
| | | LGQYRNEVHTMLGQSTEEIR |
| | | (SEQ ID NO 335) |
| | | LKGWFEPIVEDMHR |
| | | (SEQ ID NO 336) |
| | | LQAEIFQAR |
| | | (SEQ ID NO 337) |
| | | MEEQTQQIR |
| | | (SEQ ID NO 338) |
| | | NEVHTMLGQSTEEIRAR ox |
| | | (SEQ ID NO 339) |
| | | QWANLMEK |
| | | (SEQ ID NO 340) |
| | | SKMEEQTQQIR |
| | | (SEQ ID NO 341) |
| | | TANLGAGAAQPLRDR |
| | | (SEQ ID NO 342) |
| gi\|1938223 | Apolipoprotein H | ATFGCHETYKLDGPEEAECTK cam cam |
| | (beta-2 glycoprotein I) | (SEQ ID NO 343) |
| | | ATVLYQGMR ox |
| | | (SEQ ID NO 344) |
| | | CLPHFAMIGNDTVMCTEQGNWTR ox cam cam |
| | | (SEQ ID NO 345) |
| | | CPFPPRPENGYVNYPAKPVLLYK cam |
| | | (SEQ ID NO 346) |
| | | CPFPPRPENGYVNYPAKPVLLYKDK cam |
| | | (SEQ ID NO 347) |
| | | CSYTVEAHCR cam cam |
| | | (SEQ ID NO 348) |
| | | DGTIEIPSCFKEHSSLAFWK cam |
| | | (SEQ ID NO 349) |
| | | FTCPLTGMWPINTLR cam |
| | | (SEQ ID NO 350) |
| | | ITCPPPPVPK cam |
| | | (SEQ ID NO 351) |
| | | KATVLYQGMR |
| | | (SEQ ID NO 352) |
| | | KCSYTVEAHCR cam cam |
| | | (SEQ ID NO 353) |
| | | RFTCPLTGMWPINTLR cam |
| | | (SEQ ID NO 354) |
| | | TGTWSFLPTCR cam |
| | | (SEQ ID NO 355) |
| | | TSYDPGEQIVYSCKPGYVSR cam |
| | | (SEQ ID NO 356) |
| | | VCPFAGILENGIVR cam |
| | | (SEQ ID NO 357) |
| | | WSPDIPACAR cam |
| | | (SEQ ID NO 358) |
| gi\|9055162 | Apolipoprotein M | CVEEFQSLTSCLDFK cam cam |
| | | (SEQ ID NO 359) |
| | | CVEEFQSLTSCLDFKAFLVTPR cam cam |
| | | (SEQ ID NO 360) |
| | | FLLYNRSPHPPEK |
| | | (SEQ ID NO 361) |
| | | LTEGKGNMELR |
| | | (SEQ ID NO 362) |
| | | QLQLRATIR |
| | | (SEQ ID NO 363) |
| | | SPHPPEKCVEEFQSLTSCLDFK cam cam |
| | | (SEQ ID NO 364) |
| | | TDLFSSSCPGGIMLK cam ox |
| | | (SEQ ID NO 365) |
| | | TDLFSSSCPGGIMLKETGQGYQR cam |
| | | (SEQ ID NO 366) |
| | | TEGRPDMKTDLFSSSCPGGIMLK ox cam |
| | | (SEQ ID NO 367) |
| gi\|2921308 | Carboxylesterase | DAGVSTYMYEFR |
| | precursor | (SEQ ID NO 368) |
| | | FAPPQPAEPWSFVK |
| | | (SEQ ID NO 369) |
| | | MNEETASLLLR |
| | | (SEQ ID NO 370) |
| | | MNEETASLLLR ox |
| | | (SEQ ID NO 371) |
| | | MNEETASLLLRR ox |
| | | (SEQ ID NO 372) |
| | | MVMKFWANFAR ox ox |
| | | (SEQ ID NO 373) |
| | | RFHSELNISESMIPAVIEK ox |
| | | (SEQ ID NO 374) |
| | | SELILDMFGDIFFGIPAVLMSR ox ox |
| | | (SEQ ID NO 375) |
| | | SFNTVPYIVGFNK |
| | | (SEQ ID NO 376) |
| | | SLRDAGVSTYMYEFR |
| | | (SEQ ID NO 377) |
| | | VLGKYISLEGFEQPVAVFLGVPFAKPPLGSLR |
| | | (SEQ ID NO 378) |
| | | YISLEGFEQPVAVFLGVPFAKPPLGSLR |
| | | (SEQ ID NO 379) |
| | | YRPSFVSDK |
| | | (SEQ ID NO 380) |
| gi\|49523333 | Clusterin | ASGIIDTLFQDR |
| | (Apolipoprotein J) | (SEQ ID NO 381) |
| | | ASGIIDTLFQDRFFAR |
| | | (SEQ ID NO 382) |
| | | ELHDPHYFSPIGFPHK |
| | | (SEQ ID NO 383) |
| | | ELHDPHYFSPIGFPHKRPHFLYPK |
| | | (SEQ ID NO 384) |
| | | HTCMKFYAR cam ox |
| | | (SEQ ID NO 385) |
| | | QQSQVLDAMQDSFAR ox |
| | | (SEQ ID NO 386) |
| | | RPHFLYPK |
| | | (SEQ ID NO 387) |
| | | SLLNSLEEAKK |
| | | (SEQ ID NO 388) |
| | | TLIEKTNAER |
| | | (SEQ ID NO 389) |
| | | YINKEIQNAVQGVK |
| | | (SEQ ID NO 390) |
| gi\|6753798 | Coagulation factor II | DNLSPPLGQCLTER cam |
| | (prothrombin) | (SEQ ID NO 391) |
| | | DTTEKELLDSYIDGR |
| | | (SEQ ID NO 392) |
| | | EECSVPVCGQEGR cam cam |
| | | (SEQ ID NO 393) |
| | | ENLDRDIALLK |
| | | (SEQ ID NO 394) |
| | | ETFMDCLEGR cam |
| | | (SEQ ID NO 395) |
| | | ETFMDCLEGR ox cam |
| | | (SEQ ID NO 396) |
| | | GIAPWQVMLFR |
| | | (SEQ ID NO 397) |
| | | GIAPWQVMLFRK ox |
| | | (SEQ ID NO 398) |
| | | GKYGFYTHVFR |
| | | (SEQ ID NO 399) |
| | | IRITDNMFCAGFK cam |
| | | (SEQ ID NO 400) |
| | | ITDNMFCAGFK cam |
| | | (SEQ ID NO 401) |
| | | KPVPFSDYIHPVCLPDKQTVTSLLR cam |
| | | (SEQ ID NO 402) |
| | | LYQGNLAVTTLGSPCLPWNSLPAK cam |
| | | (SEQ ID NO 403) |
| | | NPDSSTTGPWCYTTDPTVR cam |
| | | (SEQ ID NO 404) |
| | | REECSVPVCGQEGR cam cam |
| | | (SEQ ID NO 405) |
| | | RGDACEGDSGGPFVMK cam |
| | | (SEQ ID NO 406) |
| | | SGGSKDNLSPPLGQCLTER cam |
| | | (SEQ ID NO 407) |
| | | SPQELLCGASLISDR cam |
| | | (SEQ ID NO 408) |
| | | TFGLGEADCGLRPLFEK cam |
| | | (SEQ ID NO 409) |
| | | TLSKYQDFDPEVK |
| | | (SEQ ID NO 410) |
| | | TTDAEFHTFFNEK |
| | | (SEQ ID NO 411) |
| | | WYQMGIVSWGEGCDRK cam |
| | | (SEQ ID NO 412) |
| | | YNWRENLDR |
| | | (SEQ ID NO 413) |
| | | YTVCDSVRKPR cam |
| | | (SEQ ID NO 414) |
| gi\|13624321 | Coagulation factor | CNEYYLLK cam |
| | XIII, beta subunit | (SEQ ID NO 415) |
| | | CNEYYLLKGSETSR cam |
| | | (SEQ ID NO 416) |
| | | CTAEGWSPNPR cam |
| | | (SEQ ID NO 417) |
| | | DAYISETSIAGSVLR |
| | | (SEQ ID NO 418) |
| | | DIVAYTCTAGYYTTTGK cam |
| | | (SEQ ID NO 419) |
| | | GDVRYPMCIR cam |
| | | (SEQ ID NO 420) |
| | | GMCASPPVIR cam |
| | | (SEQ ID NO 421) |
| | | IAQYYYTFK |
| | | (SEQ ID NO 422) |
| | | ILHGDLIDFVCK cam |
| | | (SEQ ID NO 423) |
| | | LIENGYFHPVK |
| | | (SEQ ID NO 424) |
| | | LSFFCLAGYATESGKQEEQIR cam |
| | | (SEQ ID NO 425) |
| | | QCDFPTVENGR cam |
| | | (SEQ ID NO 426) |
| | | QGYNLSPSIPLSEISAQCNR cam |
| | | (SEQ ID NO 427) |
| | | QTGEAECQANGWSLTPQCNK cam cam |
| | | (SEQ ID NO 428) |
| | | RDAYISETSIAGSVLR |
| | | (SEQ ID NO 429) |
| | | SFYFPMSVDK |
| | | (SEQ ID NO 430) |
| | | SFYFPMSVDKK ox |
| | | (SEQ ID NO 431) |
| | | TTGGKDEEVVHCLSAGWSSQPSCR cam cam |
| | | (SEQ ID NO 432) |
| | | VKDIVAYTCTAGYYTTTGK cam |
| | | (SEQ ID NO 433) |
| gi\|6996919 | Complement | AEGIPEFYDYDVALVK |
| | histocompatibility 2, | (SEQ ID NO 434) |
| | complement | ALLDIGRDPK |
| | component factor B | (SEQ ID NO 435) |
| | | ALRLPQTATCK cam |
| | | (SEQ ID NO 436) |
| | | CLTNLIEKVASYGVRPR cam |
| | | (SEQ ID NO 437) |
| | | CPRPQDFENGEFWPR cam |
| | | (SEQ ID NO 438) |
| | | DVKALFVSEQGK |
| | | (SEQ ID NO 439) |
| | | FIQVGVISWGVVDVCR cam |
| | | (SEQ ID NO 440) |
| | | GDSGGPLIVHKR |
| | | (SEQ ID NO 441) |
| | | GGSFQLLQGGQALEYLCPSGFYPYPVQTR cam |
| | | (SEQ ID NO 442) |
| | | GNDYHKQPWQAK |
| | | (SEQ ID NO 443) |
| | | HVIIIMTDGLHNMGGNPVTVIQDIR ox |
| | | (SEQ ID NO 444) |
| | | KDNEHHVFK |
| | | (SEQ ID NO 445) |
| | | LEDIVTYHCSR cam |
| | | (SEQ ID NO 446) |
| | | LKYGQTLRPICLPCTEGTTR cam cam |
| | | (SEQ ID NO 447) |
| | | LNQISYEDHKLK |
| | | (SEQ ID NO 448) |
| | | NPREDYLDVYVFGVGPLVDSVNINALASK |
| | | (SEQ ID NO 449) |
| | | QHKEQLLPVK |
| | | (SEQ ID NO 450) |
| | | QQLVPSYAR |
| | | (SEQ ID NO 451) |
| | | RDLEIEEVLFHPK |
| | | (SEQ ID NO 452) |
| | | RQQLVPSYAR |
| | | (SEQ ID NO 453) |
| | | SLSLCGMVWEHK cam |
| | | (SEQ ID NO 454) |
| | | SLSLCGMVWEHKK cam |
| | | (SEQ ID NO 455) |
| | | SRFIQVGVISWGVVDVCR cam |
| | | (SEQ ID NO 456) |
| | | STGSWSDLQTR |
| | | (SEQ ID NO 457) |
| | | VKDASEVVTPR |
| | | (SEQ ID NO 458) |
| | | VKDMEDLENVFYQMIDETK ox ox |
| | | (SEQ ID NO 459) |
| | | VSDERSSDADWVTEK |
| | | (SEQ ID NO 460) |
| | | WDGQTAICDDGAGYCPNPGIPIGTR cam cam |
| | | (SEQ ID NO 461) |
| | | YGLLTYATVPK |
| | | (SEQ ID NO 462) |
| | | YGQTLRPICLPCTEGTTR cam cam |
| | | (SEQ ID NO 463) |
| gi\|28175786 | Complement C3 | AAVFNHFISDGVKK |
| | precursor (HSE-MSF) | (SEQ ID NO 464) |
| | | AFYEHAPK |
| | | (SEQ ID NO 465) |
| | | AVMVSFQSGYLFIQTDK ox |
| | | (SEQ ID NO 466) |
| | | DNHLAPGQQTTLR |
| | | (SEQ ID NO 468) |
| | | DNHLAPGQQTTLRIEGNQGAR |
| | | (SEQ ID NO 469) |
| | | DSCIGTLVVKGDPR cam |
| | | (SEQ ID NO 470) |
| | | EPGQDLVVLSLPITPEFIPSFR |
| | | (SEQ ID NO 471) |
| | | EVVADSVWVDVKDSCIGTLVVK cam |
| | | (SEQ ID NO 472) |
| | | FFKPAMPFDLMVFVTNPDGSPASK ox ox |
| | | (SEQ ID NO 473) |
| | | GDPRDNHLAPGQQTTLR |
| | | (SEQ ID NO 474) |
| | | IEGNQGAR |
| | | (SEQ ID NO 475) |
| | | IFTVDNNLLPVGK |
| | | (SEQ ID NO 476) |
| | | IRAFYEHAPK |
| | | (SEQ ID NO 477) |
| | | IRYYTYLVMNK ox |
| | | (SEQ ID NO 478) |
| | | ISLAHSLTR |
| | | (SEQ ID NO 479) |
| | | KVLMEGVRPSNADALVGK |
| | | (SEQ ID NO 480) |
| | | LESEETIVLEAHDAQGDIPVTVTVQDFLKR |
| | | (SEQ ID NO 481) |
| | | LSINTPNSR |
| | | (SEQ ID NO 482) |
| | | LVAYYTLIGASGQR |
| | | (SEQ ID NO 483) |
| | | MELKPGDNLNVNFHLR ox |
| | | (SEQ ID NO 484) |
| | | NVDGTAFVIFGVQDGDKK |
| | | (SEQ ID NO 485) |
| | | NYAGVFMDAGLAFK |
| | | (SEQ ID NO 486) |
| | | QIFSAEFEVK |
| | | (SEQ ID NO 487) |
| | | QPLTITVR |
| | | (SEQ ID NO 488) |
| | | QVLTSEKTVLTGASGHLR |
| | | (SEQ ID NO 489) |
| | | SGIPIVTSPYQIHFTK |
| | | (SEQ ID NO 490) |
| | | SLYVSVTVILHSGSDMVEAER ox |
| | | (SEQ ID NO 491) |
| | | TIYTPGSTVLYR |
| | | (SEQ ID NO 492) |
| | | TMEAHPYSTMHNSNNYLHLSVSR ox ox |
| | | (SEQ ID NO 493) |
| | | TSQGLQTEQR |
| | | (SEQ ID NO 494) |
| | | TVLTGASGHLR |
| | | (SEQ ID NO 495) |
| | | TVVILIETPDGIPVKR |
| | | (SEQ ID NO 496) |
| | | VEPTETFYYIDDPNGLEVSIIAK |
| | | (SEQ ID NO 497) |
| | | VGLVAVDKGVFVLNK |
| | | (SEQ ID NO 498) |
| | | VLMEGVRPSNADALVGK |
| | | (SEQ ID NO 499) |
| | | VVIEDGVGDAVLTR |
| | | (SEQ ID NO 500) |
| | | VVIEDGVGDAVLTRK |
| | | (SEQ ID NO 501) |
| | | YVTVVANFGETVVEK |
| | | (SEQ ID NO 502) |
| | | YYTYLVMNK |
| | | (SEQ ID NO 503) |
| gi\|220349 | Complement C4 | APHIQLVAQSPWLR |
| | | (SEQ ID NO 504) |
| | | ATETQGVNLLFSSR |
| | | (SEQ ID NO 505) |
| | | ATETQGVNLLFSSRR |
| | | (SEQ ID NO 506) |
| | | FALMDEQGKR |
| | | (SEQ ID NO 507) |
| | | FVSSAFSLDLSR |
| | | (SEQ ID NO 508) |
| | | GHIFVQTDQPIYNPGQR |
| | | (SEQ ID NO 509) |
| | | GLETQAKLVEGR |
| | | (SEQ ID NO 510) |
| | | GTGFLSIEPLDPR |
| | | (SEQ ID NO 511) |
| | | HLVPGAHFLLQALVQEMSGSEASNVPVK ox |
| | | (SEQ ID NO 512) |
| | | KYVLPNFEVK |
| | | (SEQ ID NO 513) |
| | | LLLFSPSVVNLGTPLSVGVQLLDAPPGQEVK |
| | | (SEQ ID NO 514) |
| | | LLVSAGSLYPAIAR |
| | | (SEQ ID NO 515) |
| | | LSSGDDFVLLSLEVPLEDVR |
| | | (SEQ ID NO 516) |
| | | LTVQAPPSRGTGFLSIEPLDPR |
| | | (SEQ ID NO 517) |
| | | MRPSTDFLTITVENSHGLR ox |
| | | (SEQ ID NO 518) |
| | | NTAFKATETQGVNLLFSSR |
| | | (SEQ ID NO 519) |
| | | RAPHIQLVAQSPWLR |
| | | (SEQ ID NO 520) |
| | | RGHIFVQTDQPIYNPGQR |
| | | (SEQ ID NO 521) |
| | | SCGLFDLRR cam |
| | | (SEQ ID NO 522) |
| | | TFLRGLETQAK |
| | | (SEQ ID NO 523) |
| | | YIYGKPVQGVAYTR |
| | | (SEQ ID NO 524) |
| | | YVLPNFEVK |
| | | (SEQ ID NO 525) |
| gi\|309119 | Complement C4b- | ATYTHRDSVR |
| | binding protein | (SEQ ID NO 526) |
| | precursor | GKGVAWSNPFPECVIVK cam |
| | | (SEQ ID NO 527) |
| | | HSGTEDFYPYNHGISYTCDPGFR cam |
| | | (SEQ ID NO 528) |
| | | IICSQPNILHGVIVSGYK cam |
| | | (SEQ ID NO 529) |
| | | IICSQPNILHGVIVSGYKATYTHR cam |
| | | (SEQ ID NO 530) |
| | | ITLVTYECDKGYR cam |
| | | (SEQ ID NO 531) |
| | | MMVYCKPSGEWEISVSCAK ox cam cam |
| | | (SEQ ID NO 532) |
| | | TMQYVPNSHDVK ox |
| | | (SEQ ID NO 533) |
| | | TVPVWSSSPPTCEK cam |
| | | (SEQ ID NO 534) |
| | | WKGTAPQCK cam |
| | | (SEQ ID NO 535) |
| | | YECLPGYGR cam |
| | | (SEQ ID NO 536) |
| gi\|15030019 | Complement | ALVHLPLEYNSAVYSR |
| | component 6 | (SEQ ID NO 537) |
| | | ATDLQLSDVFLK |
| | | (SEQ ID NO 538) |
| | | CLPDRTWSQGDVECQR cam cam |
| | | (SEQ ID NO 539) |
| | | ECNNPAPQR cam |
| | | (SEQ ID NO 540) |
| | | FDPCQCAPCPNNGRPR cam cam cam |
| | | (SEQ ID NO 541) |
| | | FFPIPIFHFSEK |
| | | (SEQ ID NO 542) |
| | | FLCDSGRCIPSK cam cam |
| | | (SEQ ID NO 543) |
| | | FLYMEIHKEDTCTK cam |
| | | (SEQ ID NO 544) |
| | | GEVLDNSFTGGICK cam |
| | | (SEQ ID NO 545) |
| | | LSGTECLCVCQSGTYGENCER cam cam cam cam |
| | | (SEQ ID NO 546) |
| | | NEDSLSVDER |
| | | (SEQ ID NO 547) |
| | | NEHSHYSSAFNK |
| | | (SEQ ID NO 548) |
| | | NEHSHYSSAFNKVIK |
| | | (SEQ ID NO 549) |
| | | NIPCAVTKR cam |
| | | (SEQ ID NO 550) |
| | | NKFLCDSGR cam |
| | | (SEQ ID NO 551) |
| | | NKNEDSLSVDER |
| | | (SEQ ID NO 552) |
| | | QELQNSGLTEEEAQNCVQYETK cam |
| | | (SEQ ID NO 553) |
| | | QRQVVVNDYYWK |
| | | (SEQ ID NO 554) |
| | | QVVVNDYYWK |
| | | (SEQ ID NO 555) |
| | | SQQAAALAWEK |
| | | (SEQ ID NO 556) |
| | | SVLRPSQFGGQPCTEPLVTFQPCVPSK cam cam |
| | | (SEQ ID NO 557) |
| | | TKFFPIPIFHFSEK |
| | | (SEQ ID NO 558) |
| | | TRECNNPAPQR cam |
| | | (SEQ ID NO 559) |
| | | TSCLKPVVQDVLTISPFQR cam |
| | | (SEQ ID NO 560) |
| | | TWSQGDVECQR cam |
| | | (SEQ ID NO 561) |
| | | VYQIGESIELTCPR cam |
| | | (SEQ ID NO 562) |
| | | YGGSFLQGSEK |
| | | (SEQ ID NO 563) |
| gi\|27462724 | Complement | CIPACGVPTEPFQVHQR cam cam |
| | component C1SA | (SEQ ID NO 564) |
| | | IFGGQPAKIENFPWQVFFNHPR |
| | | (SEQ ID NO 565) |
| | | ISDPLMYVGTMSVR ox ox |
| | | (SEQ ID NO 566) |
| | | LQVVFTSDFSNEER |
| | | (SEQ ID NO 567) |
| | | LRYHGDPISCAK cam |
| | | (SEQ ID NO 568) |
| | | NQQFGPYCGNGFPGPLTIR cam |
| | | (SEQ ID NO 569) |
| | | SPNSPIIEEFQFPYNK |
| | | (SEQ ID NO 570) |
| | | WVNDQLGIELPR |
| | | (SEQ ID NO 571) |
| | | YHGDPISCAK cam |
| | | (SEQ ID NO 572) |
| gi\|19072788 | Complement | CDNGFSPPSGYSWDYLR cam |
| | component factor h | (SEQ ID NO 573) |
| | | CIEKIPCSQPPTIEHGSINLPR cam cam |
| | | (SEQ ID NO 574) |
| | | CLPVTELENGR cam |
| | | (SEQ ID NO 575) |
| | | CSPPYILNGIYTPHR cam |
| | | (SEQ ID NO 576) |
| | | CTAQGWEPEVPCVR cam cam |
| | | (SEQ ID NO 577) |
| | | CTAQGWEPEVPCVRK cam cam |
| | | (SEQ ID NO 578) |
| | | CTLKPCEFPQFK cam cam |
| | | (SEQ ID NO 579) |
| | | CTLKPCEFPQFKYGR cam cam |
| | | (SEQ ID NO 580) |
| | | CTPTGWIPVPR cam |
| | | (SEQ ID NO 581) |
| | | CVATDQLEKCR cam cam |
| | | (SEQ ID NO 582) |
| | | CVEILCTPPR cam cam |
| | | (SEQ ID NO 583) |
| | | GDAVCTGSGWSSQPFCEEKR cam cam |
| | | (SEQ ID NO 584) |
| | | HTEKIYSHSGEDIEFGCK cam |
| | | (SEQ ID NO 585) |
| | | IIHRSDDEIR |
| | | (SEQ ID NO 586) |
| | | IKTCSASDIHIDNGFLSESSSIYALNR cam |
| | | (SEQ ID NO 587) |
| | | IPCSQPPTIEHGSINLPR cam |
| | | (SEQ ID NO 588) |
| | | IVSGAAETDQEYYFGQVVR |
| | | (SEQ ID NO 589) |
| | | KPCGHPGDTPFGSFR cam |
| | | (SEQ ID NO 590) |
| | | KVEYSHGEVVK |
| | | (SEQ ID NO 591) |
| | | LYYEESLRPNFPVSIGNK |
| | | (SEQ ID NO 592) |
| | | LYYEESLRPNFPVSIGNKYSYK |
| | | (SEQ ID NO 593) |
| | | NGKWVASNPSR |
| | | (SEQ ID NO 594) |
| | | SCDMPVFENSITKNTR cam ox |
| | | (SEQ ID NO 595) |
| | | SDDEIRYECNYGFYPVTGSTVSK cam |
| | | (SEQ ID NO 596) |
| | | SYRTGEQVTFR |
| | | (SEQ ID NO 597) |
| | | TCGDIPELEHGSAK cam |
| | | (SEQ ID NO 598) |
| | | TSCPPPPQIPNTQVIETTVK cam |
| | | (SEQ ID NO 599) |
| | | VGDLLEFSCHSGHR cam |
| | | (SEQ ID NO 600) |
| | | VGPDSVQCYHFGWSPGFPTCK cam cam |
| | | (SEQ ID NO 601) |
| | | YRVGDLLEFSCHSGHR cam |
| | | (SEQ ID NO 602) |
| gi\|6671744 | Complement | ECELPNSVPACVPWSPYLFQPNDR cam cam |
| | component factor i | (SEQ ID NO 603) |
| | | ITCGGIYIGGCWILTAAHCVRPSR cam cam cam |
| | | (SEQ ID NO 604) |
| | | SPSASDLPQEELVDQK |
| | | (SEQ ID NO 605) |
| | | VANYFDWISYHVGR |
| | | (SEQ ID NO 606) |
| | | VANYFDWISYHVGRSLVSQHNV |
| | | (SEQ ID NO 607) |
| | | VIGGKPANVGDYPWQVAIKDGQR |
| | | (SEQ ID NO 608) |
| | | VIVHEKYNGATFQNDIALIEMK |
| | | (SEQ ID NO 609) |
| gi\|9954973 | Complement D Chain | DFDSVPPVVR |
| | D, N-Terminally | (SEQ ID NO 610) |
| | Truncated C3dg | DICEGQVNSLPGSINK cam |
| | Fragment | (SEQ ID NO 611) |
| | | EADVSLTAFVLIALQEAR |
| | | (SEQ ID NO 612) |
| | | FLNTAKDR |
| | | (SEQ ID NO 613) |
| | | GYTQQLAFK |
| | | (SEQ ID NO 614) |
| | | KGYTQQLAFK |
| | | (SEQ ID NO 615) |
| | | QKPDGVFQEDGPVIHQEMIGGFR |
| | | (SEQ ID NO 616) |
| | | RQEALELIK |
| | | (SEQ ID NO 617) |
| | | WLILEK |
| | | (SEQ ID NO 618) |
| | | WLNDER |
| | | (SEQ ID NO 619) |
| gi\|6754132 | Complement | AKGNEQSFHVSLR |
| | histocompatibility 2, | (SEQ ID NO 620) |
| | Q region locus 10 | APWMEQEGPEYWER |
| | | (SEQ ID NO 621) |
| | | APWMEQEGPEYWERETQR |
| | | (SEQ ID NO 622) |
| | | AYLEAECVEWLLR cam |
| | | (SEQ ID NO 623) |
| | | FDSDAETPRMEPR |
| | | (SEQ ID NO 624) |
| | | FIIVGYVDDTQFVR |
| | | (SEQ ID NO 625) |
| | | FIIVGYVDDTQFVRFDSDAETPR |
| | | (SEQ ID NO 626) |
| | | GNEQSFHVSLR |
| | | (SEQ ID NO 627) |
| | | GYLQYAYDGR |
| | | (SEQ ID NO 628) |
| | | GYLQYAYDGRDYIALNEDLK |
| | | (SEQ ID NO 629) |
| | | KWEQAGAAEYYR |
| | | (SEQ ID NO 630) |
| | | TDPPKTHVTHHPGSEGDVTLR |
| | | (SEQ ID NO 631) |
| | | THVTHHPGSEGDVTLR |
| | | (SEQ ID NO 632) |
| | | TWTAADVAAIITR |
| | | (SEQ ID NO 633) |
| | | WASVVVPLGK |
| | | (SEQ ID NO 634) |
| | | WEQAGAAEYYR |
| | | (SEQ ID NO 635) |
| | | YFETSVSRPGLGEPR |
| | | (SEQ ID NO 636) |
| | | YLELGKETLLR |
| | | (SEQ ID NO 637) |
| gi\|54173 | Contraspin | ALYQTEAFTADFQQPTEAK |
| | | (SEQ ID NO 638) |
| | | AVLDVAETGTEAAAATGVIGGIR |
| | | (SEQ ID NO 639) |
| | | AVLDVAETGTEAAAATGVIGGIRK |
| | | (SEQ ID NO 640) |
| | | AVLPAVCFNRPFLIVIYHTSAQSILFMAK cam ox |
| | | (SEQ ID NO 641) |
| | | DLQILAEFHEK |
| | | (SEQ ID NO 642) |
| | | DLQILAEFHEKTR |
| | | (SEQ ID NO 643) |
| | | EVFTEQADLSGITEAK |
| | | (SEQ ID NO 644) |
| | | EVFTEQADLSGITEAKK |
| | | (SEQ ID NO 645) |
| | | FSIASDYRLEEDVLPEMGIK |
| | | (SEQ ID NO 646) |
| | | GKTMEEILEGLK ox |
| | | (SEQ ID NO 647) |
| | | HFRDEELSCSVLELK cam |
| | | (SEQ ID NO 648) |
| | | ISFDPQDTFESEFYLDEKR |
| | | (SEQ ID NO 649) |
| | | KLISELDDGTLMVLVNYIYFK ox |
| | | (SEQ ID NO 650) |
| | | KLSVSQVVHK |
| | | (SEQ ID NO 651) |
| | | KTLFSSQIEELNLPK |
| | | (SEQ ID NO 652) |
| | | LISELDDGTLMVLVNYIYFK ox |
| | | (SEQ ID NO 653) |
| | | MQQVEASLQPETLR |
| | | (SEQ ID NO 654) |
| | | MQQVEASLQPETLRK |
| | | (SEQ ID NO 655) |
| | | NIVFSPLSISAALALVSLGAK |
| | | (SEQ ID NO 656) |
| | | NQDKNIVFSPLSISAALALVSLGAK |
| | | (SEQ ID NO 657) |
| | | TLFSSQIEELNLPK |
| | | (SEQ ID NO 658) |
| | | TRALYQTEAFTADFQQPTEAK |
| | | (SEQ ID NO 659) |
| gi\|38614350 | Cp protein | AEDEHLGILGPPIHANVGDK |
| | | (SEQ ID NO 660) |
| | | AEDEHLGILGPPIHANVGDKVK |
| | | (SEQ ID NO 661) |
| | | AEVEDKVYVHLK |
| | | (SEQ ID NO 662) |
| | | AGLQAFFQVR |
| | | (SEQ ID NO 663) |
| | | ALYFEYTDGTFSK |
| | | (SEQ ID NO 664) |
| | | DCNKPSPEDNIQDR cam |
| | | (SEQ ID NO 665) |
| | | DIFTGLIGPMKICK cam |
| | | (SEQ ID NO 666) |
| | | DLYSGLIGPLIVCR cam |
| | | (SEQ ID NO 667) |
| | | DTANLFPHK |
| | | (SEQ ID NO 668) |
| | | EMGPTYADPVCLSK ox cam |
| | | (SEQ ID NO 669) |
| | | ETFTYEWTVPK |
| | | (SEQ ID NO 670) |
| | | EYTDGSFTNR |
| | | (SEQ ID NO 671) |
| | | EYTDGSFTNRK |
| | | (SEQ ID NO 672) |
| | | GQHPLSIQPMGVSFTAENEGTYYGPPGR ox |
| | | (SEQ ID NO 673) |
| | | IYHSHVDAPK |
| | | (SEQ ID NO 674) |
| | | IYHSHVDAPKDIASGLIGPLILCK cam |
| | | (SEQ ID NO 675) |
| | | IYTFHAHGVTYTK |
| | | (SEQ ID NO 676) |
| | | KALYFEYTDGTFSK |
| | | (SEQ ID NO 677) |
| | | KLISVDTEQSNFYLQNGPDR |
| | | (SEQ ID NO 678) |
| | | LISVDTEQSNFYLQNGPDR |
| | | (SEQ ID NO 679) |
| | | MAYREYTDGSFTNR ox |
| | | (SEQ ID NO 680) |
| | | MFGNLQGLTMHVK ox ox |
| | | (SEQ ID NO 681) |
| | | MFTTAPDQVDKEDEDFQESNK ox |
| | | (SEQ ID NO 682) |
| | | MYYSGVDPTKDIFTGLIGPMK |
| | | (SEQ ID NO 683) |
| | | NMATRPYSIHAHGVK |
| | | (SEQ ID NO 684) |
| | | NMATRPYSIHAHGVK ox |
| | | (SEQ ID NO 685) |
| | | QFEDFTVYLGER |
| | | (SEQ ID NO 686) |
| | | QKYTVNQCQR cam |
| | | (SEQ ID NO 687) |
| | | RAEDEHLGILGPPIHANVGDK |
| | | (SEQ ID NO 688) |
| | | RDTANLFPHK |
| | | (SEQ ID NO 689) |
| | | SGAGREDSACIPWAYYSTVDR cam |
| | | (SEQ ID NO 690) |
| | | SLTLLMNPDTK ox |
| | | (SEQ ID NO 691) |
| | | TESSTVVPTLPGEVR |
| | | (SEQ ID NO 692) |
| | | TIDKPAWLGFLGPVIK |
| | | (SEQ ID NO 693) |
| | | TYTWQIPER |
| | | (SEQ ID NO 694) |
| | | TYYVAAVEVEWDYSPSR |
| | | (SEQ ID NO 695) |
| | | VFFEQGATR |
| | | (SEQ ID NO 696) |
| | | VKDLYSGLIGPLIVCR cam |
| | | (SEQ ID NO 697) |
| | | VNKDNEEFLESNK |
| | | (SEQ ID NO 698) |
| | | YTVNQCQR cam |
| | | (SEQ ID NO 699) |
| gi\|19388017 | Cpn2 protein | AAHSQCAYSNPEGTVLLACEESR cam cam |
| | | (SEQ ID NO 700) |
| | | ALGLDEGEPAGSWDLTVEGR |
| | | (SEQ ID NO 701) |
| | | CRWLNIQLSSR cam |
| | | (SEQ ID NO 702) |
| | | DLRTLNLAQNLLTQLPK |
| | | (SEQ ID NO 703) |
| | | GAFQSLTGLQMLK |
| | | (SEQ ID NO 704) |
| | | GQLVPNLKQEQLICPVNPGHLSFR cam |
| | | (SEQ ID NO 705) |
| | | HLEPDAFGGLPR |
| | | (SEQ ID NO 706) |
| | | LFQSLRDLR |
| | | (SEQ ID NO 707) |
| | | LVSLTLSHNAITDLPEHVFR |
| | | (SEQ ID NO 708) |
| | | LVSLTLSHNAITDLPEHVFRNLEQLVK |
| | | (SEQ ID NO 709) |
| | | QEQLICPVNPGHLSFR cam |
| | | (SEQ ID NO 710) |
| | | TLNLAQNLLTQLPK |
| | | (SEQ ID NO 711) |
| | | TLPGRLFQSLR |
| | | (SEQ ID NO 712) |
| | | VVFLNTQVR |
| | | (SEQ ID NO 713) |
| | | WLNIQLSSR |
| | | (SEQ ID NO 714) |
| gi\|11055360 | Epidermal growth | ACGPDYYEVEEDGIR cam |
| | factor receptor | (SEQ ID NO 715) |
| | isoform 2 | ACGPDYYEVEEDGIRK cam |
| | | (SEQ ID NO 716) |
| | | AVNHVCNPLCSSEGCWGPEPR cam cam cam |
| | | (SEQ ID NO 717) |
| | | CNILEGEPR cam |
| | | (SEQ ID NO 718) |
| | | FSNNPILCNMDTIQWR cam |
| | | (SEQ ID NO 719) |
| | | GPDNCIQCAHYIDGPHCVK cam cam cam |
| | | (SEQ ID NO 720) |
| | | GRSPSDCCHNQCAAGCTGPR cam cam cam cam |
| | | (SEQ ID NO 721) |
| | | IICAQQCSHR cam cam |
| | | (SEQ ID NO 722) |
| | | IPLENLQIIR |
| | | (SEQ ID NO 723) |
| | | KLFGTPNQK |
| | | (SEQ ID NO 724) |
| | | LTQLGTFEDHFLSLQR |
| | | (SEQ ID NO 725) |
| | | MYNNCEVVLGNLEITYVQR ox cam |
| | | (SEQ ID NO 726) |
| | | NLCYANTINWK cam |
| | | (SEQ ID NO 727) |
| | | NLCYANTINWKK cam |
| | | (SEQ ID NO 728) |
| | | NLQEILIGAVR |
| | | (SEQ ID NO 729) |
| | | NYVVTDHGSCVR cam |
| | | (SEQ ID NO 730) |
| | | SLKEISDGDVIISGNR |
| | | (SEQ ID NO 731) |
| | | SPSDCCHNQCAAGCTGPR cam cam cam cam |
| | | (SEQ ID NO 732) |
| | | TIQEVAGYVLIALNTVER |
| | | (SEQ ID NO 733) |
| | | TPPLDPRELEILK |
| | | (SEQ ID NO 734) |
| | | YCTAISGDLHILPVAFKGDSFTR cam |
| | | (SEQ ID NO 735) |
| | | YSFGATCVKK cam |
| | | (SEQ ID NO 736) |
| gi\|6679689 | Esterase 1 | AISESGVVINTNVGKK |
| | | (SEQ ID NO 737) |
| | | FAPPQPAEPWSFVK |
| | | (SEQ ID NO 738) |
| | | ILSDMFSTEKEILPLK ox |
| | | (SEQ ID NO 739) |
| | | ISEDCLYLNIYSPADLTK cam |
| | | (SEQ ID NO 740) |
| | | KSELILDMFGDIFFGIPAVLLSR |
| | | (SEQ ID NO 741) |
| | | LKAEEVAFWTELLAK |
| | | (SEQ ID NO 742) |
| | | MNEETASLLLR |
| | | (SEQ ID NO 743) |
| | | MNEETASLLLRR |
| | | (SEQ ID NO 744) |
| | | MVMKFWANFAR |
| | | (SEQ ID NO 745) |
| | | NGNPNGEGLPHWPEYDEQEGYLQIGATTQQAQR |
| | | (SEQ ID NO 746) |
| | | QKTESELLEISGK |
| | | (SEQ ID NO 747) |
| | | RPQTVEGDHGDEIFFVFGAPLLK |
| | | (SEQ ID NO 748) |
| | | SELILDMFGDIFFGIPAVLLSR ox |
| | | (SEQ ID NO 749) |
| | | SFNTVPYIVGFNK |
| | | (SEQ ID NO 750) |
| | | SLRDAGVSTYMYEFR |
| | | (SEQ ID NO 751) |
| | | YISLEGFEQPVAVFLGVPFAKPPLGSLR |
| | | (SEQ ID NO 752) |
| | | YRPSFVSDK |
| | | (SEQ ID NO 753) |
| | | YRPSFVSDKRPQTVEGDHGDEIFFVFGAPLLK |
| | | (SEQ ID NO 754) |
| gi\|33563252 | Fibrinogen, alpha | ALTEMRQMR ox ox |
| | polypeptide | (SEQ ID NO 755) |
| | | AQQIQALQSNVR |
| | | (SEQ ID NO 756) |
| | | AVNREINLQDYEGHQK |
| | | (SEQ ID NO 757) |
| | | DSDWPFCSDDDWNHKCPSGCR cam cam cam |
| | | (SEQ ID NO 758) |
| | | EINLQDYEGHQK |
| | | (SEQ ID NO 759) |
| | | EINLQDYEGHQKQLQQVIAK |
| | | (SEQ ID NO 760) |
| | | GDFANANNFDNTYGQVSEDLR |
| | | (SEQ ID NO 761) |
| | | GDFANANNFDNTYGQVSEDLRR |
| | | (SEQ ID NO 762) |
| | | GDFATRGPGSK |
| | | (SEQ ID NO 763) |
| | | GDSRGDFATR |
| | | (SEQ ID NO 764) |
| | | GLIDEANQDFTNR |
| | | (SEQ ID NO 765) |
| | | GLIDEANQDFTNRINK |
| | | (SEQ ID NO 766) |
| | | HPDLSGFFDNHFGLISPNFKEFGSK |
| | | (SEQ ID NO 767) |
| | | LKNSLFDFQR |
| | | (SEQ ID NO 768) |
| | | MADEAGSEAHREGETR |
| | | (SEQ ID NO 769) |
| | | MKGLIDEANQDFTNR |
| | | (SEQ ID NO 770) |
| | | MSPVPDLVPGSFK ox |
| | | (SEQ ID NO 771) |
| | | MSPVPDLVPGSFKSQLQEAPPEWK ox |
| | | (SEQ ID NO 772) |
| | | NNKDSNSLTR |
| | | (SEQ ID NO 773) |
| | | QYLPALKMSPVPDLVPGSFK ox |
| | | (SEQ ID NO 774) |
| | | RLEVDIDIK |
| | | (SEQ ID NO 775) |
| | | SQLQEAPPEWK |
| | | (SEQ ID NO 776) |
| | | SQLQEAPPEWKALTEMR |
| | | (SEQ ID NO 777) |
| | | THSDSDILTNIEDPSSHVPEFSSSSK |
| | | (SEQ ID NO 778) |
| | | VIEKAQQIQALQSNVR |
| | | (SEQ ID NO 779) |
| | | VTSSGTSTTHR |
| | | (SEQ ID NO 780) |
| gi\|33859809 | Fibrinogen, B beta | AHYGGFTVQNEASK |
| | polypeptide | (SEQ ID NO 781) |
| | | AHYGGFTVQNEASKYQVSVNK |
| | | (SEQ ID NO 782) |
| | | EDGGGWWYNR |
| | | (SEQ ID NO 783) |
| | | EEPPSLRPAPPPISGGGYR |
| | | (SEQ ID NO 784) |
| | | ENENVINEYSSILEDQR |
| | | (SEQ ID NO 785) |
| | | GFGNIATNEDAK |
| | | (SEQ ID NO 786) |
| | | GFGNIATNEDAKK |
| | | (SEQ ID NO 787) |
| | | GGETSEMYLIQPDTSIKPYR |
| | | (SEQ ID NO 788) |
| | | GSWYSMRR ox |
| | | (SEQ ID NO 789) |
| | | HGTDDGVVWMNWK |
| | | (SEQ ID NO 790) |
| | | IQKLESDISAQMEYCR cam |
| | | (SEQ ID NO 791) |
| | | IRPFFPQQ |
| | | (SEQ ID NO 792) |
| | | KEEPPSLRPAPPPISGGGYR |
| | | (SEQ ID NO 793) |
| | | KGGETSEMYLIQPDTSIKPYR |
| | | (SEQ ID NO 794) |
| | | LYIDETVNDNIPLNLR |
| | | (SEQ ID NO 795) |
| | | LYIDETVNDNIPLNLRVLR |
| | | (SEQ ID NO 796) |
| | | MGPTELLIEMEDWKGDK |
| | | (SEQ ID NO 797) |
| | | MSMKIRPFFPQQ ox |
| | | (SEQ ID NO 798) |
| | | QAQVKENENVINEYSSILEDQR |
| | | (SEQ ID NO 799) |
| | | QCSKEDGGGWWYNR cam |
| | | (SEQ ID NO 800) |
| | | QDGSVDFGRK |
| | | (SEQ ID NO 801 |
| | | SILEDLRSK |
| | | (SEQ ID NO 802) |
| | | TENGGWTVIQNR |
| | | (SEQ ID NO 803) |
| | | TPCTVSCNIPVVSGK cam cam |
| | | (SEQ ID NO 804) |
| | | TPCTVSCNIPVVSGKECEEIIR cam cam cam |
| | | (SEQ ID NO 805) |
| | | VYCDMKTENGGWTVIQNR cam |
| | | (SEQ ID NO 806) |
| | | YCGLPGEYWLGNDK cam |
| | | (SEQ ID NO 807) |
| | | YCGLPGEYWLGNDKISQLTR cam |
| | | (SEQ ID NO 808) |
| | | YYWGGLYSWDMSK |
| | | (SEQ ID NO 809) |
| gi\|19527078 | Fibrinogen, gamma | AIQVYYNPDQPPKPGMIDSATQK |
| | polypeptide | (SEQ ID NO 810) |
| | | CHAGHLNGVYHQGGTYSK cam |
| | | (SEQ ID NO 811) |
| | | DNCCILDER cam cam |
| | | (SEQ ID NO 812) |
| | | EGFGHLSPTGTTEFWLGNEK |
| | | (SEQ ID NO 813) |
| | | ESGLYFIRPLK |
| | | (SEQ ID NO 814) |
| | | ESGLYFIRPLKAK |
| | | (SEQ ID NO 815) |
| | | FGSFCPTTCGIADFLSSYQTDVDNDLR cam cam |
| | | (SEQ ID NO 816) |
| | | GAKESGLYFIRPLK |
| | | (SEQ ID NO 817) |
| | | IHLISMQSTIPYALR |
| | | (SEQ ID NO 818) |
| | | IIPFNRLSIGEGQQHHMGGSK |
| | | (SEQ ID NO 819) |
| | | IQLKDWNGR |
| | | (SEQ ID NO 820) |
| | | LSIGEGQQHHMGGSK |
| | | (SEQ ID NO 821) |
| | | LSIGEGQQHHMGGSKQAGDV |
| | | (SEQ ID NO 822) |
| | | MVEEIVKYEALLLTHETSIR |
| | | (SEQ ID NO 823) |
| | | QQFLVYCEIDGSGNGWTVLQK cam |
| | | (SEQ ID NO 824) |
| | | QQFLVYCEIDGSGNGWTVLQKR cam |
| | | (SEQ ID NO 825) |
| | | RIDGSLDFK |
| | | (SEQ ID NO 826) |
| | | SSTTNGFDDGIIWATWK |
| | | (SEQ ID NO 827) |
| | | SSTTNGFDDGIIWATWKSR |
| | | (SEQ ID NO 828) |
| | | TSTADYAMFR |
| | | (SEQ ID NO 829) |
| | | WYSMKETTMK |
| | | (SEQ ID NO 830) |
| | | YLQEIYNSNNQK |
| | | (SEQ ID NO 831) |
| gi\|1181242 | Fibronectin | ATGVFTTLQPLR |
| | | (SEQ ID NO 832) |
| | | DGQERDAPIVNR |
| | | (SEQ ID NO 833) |
| | | DTLTSRPAQGVITTLENVSPPRR |
| | | (SEQ ID NO 834) |
| | | FLTTTPNSLLVSWQAPR |
| | | (SEQ ID NO 835) |
| | | FTNIGPDTMR |
| | | (SEQ ID NO 836) |
| | | GGQPKQYNVGPLASK |
| | | (SEQ ID NO 837) |
| | | GVTYNIIVEALQNQR |
| | | (SEQ ID NO 838) |
| | | GVTYNIIVEALQNQRR |
| | | (SEQ ID NO 839) |
| | | NLQPGSEYTATLVAVK |
| | | (SEQ ID NO 840) |
| | | HHAEHSVGRPR |
| | | (SEQ ID NO 841) |
| | | IAGYRLTAGLTR |
| | | (SEQ ID NO 842) |
| | | IHLYTLNDNAR |
| | | (SEQ ID NO 843) |
| | | ITGYIIKYEKPGSPPR |
| | | (SEQ ID NO 844) |
| | | ITYGETGGNSPVQEFTVPGSK |
| | | (SEQ ID NO 845) |
| | | LGVRPSQGGEAPR |
| | | (SEQ ID NO 846) |
| | | LTCQCLGFGSGHFR cam cam |
| | | (SEQ ID NO 847) |
| | | NTFAEITGLSPGVTYLFK |
| | | (SEQ ID NO 848) |
| | | QYNVGPLASKYPLR |
| | | (SEQ ID NO 849) |
| | | SSPVIIDASTAIDAPSNLR |
| | | (SEQ ID NO 850) |
| | | STTPDITGYR |
| | | (SEQ ID NO 851) |
| | | TKTETITGFQVDAIPANGQTPVQR |
| | | (SEQ ID NO 852) |
| | | VTDATETTITISWR |
| | | (SEQ ID NO 853) |
| | | VTWAPPPSIELTNLLVR |
| | | (SEQ ID NO 854) |
| | | WLPSTSPVTGYR |
| | | (SEQ ID NO 855) |
| | | TVLVTWTPPR |
| | | (SEQ ID NO 856) |
| gi\|46849812 | Fibronectin 1 | APITGYIIR |
| | | (SEQ ID NO 857) |
| | | ATGVFTTLQPLR |
| | | (SEQ ID NO 858) |
| | | CDPIDQCQDSETR cam cam |
| | | (SEQ ID NO 859) |
| | | CHEGGQSYK cam |
| | | (SEQ ID NO 860) |
| | | DGQERDAPIVNR |
| | | (SEQ ID NO 861) |
| | | DQCIVDDITYNVNDTFHK cam |
| | | (SEQ ID NO 862) |
| | | EYLGAICSCTCFGGQR cam cam cam |
| | | (SEQ ID NO 863) |
| | | FLTTTPNSLLVSWQAPR |
| | | (SEQ ID NO 864) |
| | | FTNIGPDTMR |
| | | (SEQ ID NO 865) |
| | | GDSPASSKPVSINYK |
| | | (SEQ ID NO 866) |
| | | GEWACIPYSQLR cam |
| | | (SEQ ID NO 867) |
| | | GGNSNGALCHFPFLYNNR cam |
| | | (SEQ ID NO 868) |
| | | GGQPKQYNVGPLASK |
| | | (SEQ ID NO 869) |
| | | GLTPGVIYEGQLISIQQYGHR |
| | | (SEQ ID NO 870) |
| | | GNLLQCVCTGNGR cam cam |
| | | (SEQ ID NO 871) |
| | | GRISCTIANR cam |
| | | (SEQ ID NO 872) |
| | | GVTYNIIVEALQNQR |
| | | (SEQ ID NO 873) |
| | | GVTYNIIVEALQNQRR |
| | | (SEQ ID NO 874) |
| | | HALQSASAGSGSFTDVR |
| | | (SEQ ID NO 875) |
| | | HHAEHSVGRPR |
| | | (SEQ ID NO 876) |
| | | HYQINQQWER |
| | | (SEQ ID NO 877) |
| | | IAGYRLTAGLTR |
| | | (SEQ ID NO 878) |
| | | IGDQWDKQHDLGHMMR ox |
| | | (SEQ ID NO 879) |
| | | IGDTWSK |
| | | (SEQ ID NO 880) |
| | | IGEKWDR |
| | | (SEQ ID NO 881) |
| | | IHLYTLNDNAR |
| | | (SEQ ID NO 882) |
| | | ISCTIANR cam |
| | | (SEQ ID NO 883) |
| | | ITGYIIKYEKPGSPPR |
| | | (SEQ ID NO 884) |
| | | ITYGETGGNSPVQEFTVPGSK |
| | | (SEQ ID NO 885) |
| | | LGVRPSQGGEAPR |
| | | (SEQ ID NO 886) |
| | | LTCQCLGFGSGHFR cam cam |
| | | (SEQ ID NO 887) |
| | | MSCTCLGNGKGEFK cam cam |
| | | (SEQ ID NO 888) |
| | | NLQPGSEYTVTLVAVKGNQQSPK |
| | | (SEQ ID NO 889) |
| | | NRCNDQDTR cam |
| | | (SEQ ID NO 890) |
| | | NTFAEITGLSPGVTYLFK |
| | | (SEQ ID NO 891) |
| | | QDRVPPSR |
| | | (SEQ ID NO 892) |
| | | QYNVGPLASKYPLR |
| | | (SEQ ID NO 893) |
| | | RPGAAEPSPDGTTGHTYNQYTQR |
| | | (SEQ ID NO 894) |
| | | SDNVPPPTDLQFVELTDVK |
| | | (SEQ ID NO 895) |
| | | SSPVIIDASTAIDAPSNLR |
| | | (SEQ ID NO 896) |
| | | STATINNIKPGADYTITLYAVTGR |
| | | (SEQ ID NO 897) |
| | | STTPDITGYR |
| | | (SEQ ID NO 898) |
| | | TEIDKPSQMQVTDVQDNSISVR ox |
| | | TFYQIGDSWEK |
| | | (SEQ ID NO 899) |
| | | TFYSCTTEGR cam |
| | | (SEQ ID NO 900) |
| | | TKTETITGFQVDAIPANGQTPVQR |
| | | (SEQ ID NO 901) |
| | | VEVLPVSLPGEHGQR |
| | | (SEQ ID NO 902) |
| | | VFAVHQGR |
| | | (SEQ ID NO 903) |
| | | VTDATETTITISWR |
| | | (SEQ ID NO 904) |
| | | VTWAPPPSIELTNLLVR |
| | | (SEQ ID NO 905) |
| | | WCHDNGVNYK cam |
| | | (SEQ ID NO 906) |
| | | WKCDPIDQCQDSETR cam cam |
| | | (SEQ ID NO 907) |
| | | WKEATIPGHLNSYTIK |
| | | (SEQ ID NO 908) |
| | | WLPSTSPVTGYR |
| | | (SEQ ID NO 909) |
| | | WSRPQAPITGYR |
| | | (SEQ ID NO 910) |
| | | YEKPGSPPR |
| | | (SEQ ID NO 911) |
| | | YIVNVYQISEEGK |
| | | (SEQ ID NO 912) |
| | | YSFCTDHAVLVQTR cam |
| | | (SEQ ID NO 913) |
| | | YTGNTYK |
| | | (SEQ ID NO 914) |
| gi\|28916693 | Gelsolin | AGKEPGLQIWR |
| | | (SEQ ID NO 915) |
| | | AVQHREVQGFESSTFSGYFK |
| | | (SEQ ID NO 916) |
| | | DGGQTAPASIR |
| | | (SEQ ID NO 917) |
| | | DPDQTDGPGLGYLSSHIANVER |
| | | (SEQ ID NO 918) |
| | | EPAHLMSLFGGKPMIIYK |
| | | (SEQ ID NO 919) |
| | | EVQGFESSTFSGYFK |
| | | (SEQ ID NO 920) |
| | | FDLVPVPPNLYGDFFTGDAYVILK |
| | | (SEQ ID NO 921) |
| | | GGVASGFKHVVPNEVVVQR |
| | | (SEQ ID NO 922) |
| | | HVVPNEVVVQR |
| | | (SEQ ID NO 923) |
| | | IEGSNKVPVDPATYGQFYGGDSYIILYNYR |
| | | (SEQ ID NO 924) |
| | | MDAHPPRLFACSNR ox cam |
| | | (SEQ ID NO 925) |
| | | NWRDPDQTDGPGLGYLSSHIANVER |
| | | (SEQ ID NO 926) |
| | | QTQVSVLPEGGETPLFKQFFK |
| | | (SEQ ID NO 927) |
| | | SEDCFILDHGR cam |
| | | (SEQ ID NO 928) |
| | | SEDCFILDHGRDGK cam |
| | | (SEQ ID NO 929) |
| | | SGALNSNDAFVLK |
| | | (SEQ ID NO 930) |
| | | SQHVQVEEGSEPDAFWEALGGK |
| | | (SEQ ID NO 931) |
| | | TASDFISKMQYPR ox |
| | | (SEQ ID NO 932) |
| | | TPSAAYLWVGAGASEAEK |
| | | (SEQ ID NO 933) |
| | | TPSAAYLWVGAGASEAEKTGAQELLK |
| | | (SEQ ID NO 934) |
| | | VEKFDLVPVPPNLYGDFFTGDAYVILK |
| | | (SEQ ID NO 935) |
| | | VPFDAATLHTSTAMAAQHGMDDDGTGQK |
| | | (SEQ ID NO 936) |
| | | VPVDPATYGQFYGGDSYIILYNYR |
| | | (SEQ ID NO 937) |
| | | VSEARPSTMVVEHPEFLK |
| | | (SEQ ID NO 938) |
| | | VSNGAGSMSVSLVADENPFAQGALR |
| | | (SEQ ID NO 939) |
| | | VVQGKEPAHLMSLFGGKPMIIYK ox |
| | | (SEQ ID NO 940) |
| | | YIETDPANR |
| | | (SEQ ID NO 941) |
| | | YIETDPANRDR |
| | | (SEQ ID NO 942) |
| gi\|52843238 | Glutathione | FLVGPDGIPVMR ox |
| | peroxidase 3 | (SEQ ID NO 943) |
| | | LFWEPMKIHDIR |
| | | (SEQ ID NO 944) |
| | | MDILSYMRR ox |
| | | (SEQ ID NO 945) |
| | | NSCPPTAELLGSPGR cam |
| | | (SEQ ID NO 946) |
| | | QEPGENSEILPSLK |
| | | (SEQ ID NO 947) |
| | | TTVSNVKMDILSYMR ox |
| | | (SEQ ID NO 948) |
| | | WNFEKFLVGPDGIPVMR ox |
| | | (SEQ ID NO 949) |
| | | YVRPGGGFVPNFQLFEK |
| | | (SEQ ID NO 950) |
| | | YVRPGGGFVPNFQLFEKGDVNGEK |
| | | (SEQ ID NO 951) |
| gi\|17512357 | Gpld1 protein | AQYVLTSPEASSR |
| | | (SEQ ID NO 952) |
| | | GIVATFYSHPR |
| | | (SEQ ID NO 953) |
| | | GKYHDVSER |
| | | (SEQ ID NO 954) |
| | | GRNQVVVAAGR |
| | | (SEQ ID NO 955) |
| | | IYDNLYGRK |
| | | (SEQ ID NO 956) |
| | | LGTSLSSGYVR |
| | | (SEQ ID NO 957) |
| | | LSGALHVYSFSSD |
| | | (SEQ ID NO 958) |
| | | NDFHRNLTMFISR ox |
| | | (SEQ ID NO 959) |
| | | NLRLMLAGSSQK ox |
| | | (SEQ ID NO 960) |
| | | NLTMFISRDIR |
| | | (SEQ ID NO 961) |
| | | SLGKVYGYFLPNR |
| | | (SEQ ID NO 962) |
| | | SSWGARLSGALHVYSFSSD |
| | | (SEQ ID NO 963) |
| | | TQPALLSTFSGDRR |
| | | (SEQ ID NO 964) |
| | | VYGYFLPNR |
| | | (SEQ ID NO 965) |
| | | WYVPVRDLLR |
| | | (SEQ ID NO 966) |
| | | YHDVSERTHWTPFLNASIHYIR |
| | | (SEQ ID NO 967) |
| gi\|1694789 | GRS protein | LAQDYLQCVLQIPQPGSGPSK cam |
| | | (SEQ ID NO 968) |
| | | QNGGWENGFVKK |
| | | (SEQ ID NO 969) |
| | | SGWMTFLEVTGKICEMLSLLK cam |
| | | (SEQ ID NO 970) |
| | | TLFTQVMEK |
| | | (SEQ ID NO 971) |
| | | VLQNVAFSVQKEVEK |
| | | (SEQ ID NO 972) |
| gi\|37719755 | GUGU alpha | AMFHINKPR |
| | | (SEQ ID NO 973) |
| | | AMFHINKPRR |
| | | (SEQ ID NO 974) |
| | | AMNQWVSGPAYYVEYLIK |
| | | (SEQ ID NO 975) |
| | | DGYMLSLNR ox |
| | | (SEQ ID NO 976) |
| | | DQKDGYMLSLNR |
| | | (SEQ ID NO 977) |
| | | EHYQEDMGSLFYLTLDVLETDCHVLSR ox cam |
| | | (SEQ ID NO 978) |
| | | GSIQHLPELDDEKPEESK |
| | | (SEQ ID NO 979) |
| | | HVPLIQPVEK |
| | | (SEQ ID NO 980) |
| | | ISAFDRFGR |
| | | (SEQ ID NO 981) |
| | | KTHTTCPDCPSPIDLSNPSALEAATESLAK cam cam |
| | | (SEQ ID NO 982) |
| | | LVVLPFPGKEQR |
| | | (SEQ ID NO 983) |
| | | MFYESVYGQCK cam |
| | | (SEQ ID NO 984) |
| | | MISAFDRFGR |
| | | (SEQ ID NO 985) |
| | | SAECPGPEKENNPLVLPP cam |
| | | (SEQ ID NO 986) |
| | | SQASCSLQHSDSEPVGICQGSTVQSSLR cam cam |
| | | (SEQ ID NO 987) |
| | | THTTCPDCPSPIDLSNPSALEAATESLAK cam cam |
| | | (SEQ ID NO 988) |
| gi\|23956086 | Hemopexin | DYFVSCPGR cam |
| | | (SEQ ID NO 989) |
| | | ELGSPPGISLETIDAAFSCPGSSR cam |
| | | (SEQ ID NO 990) |
| | | FNPVTGEVPPR |
| | | (SEQ ID NO 991) |
| | | FNPVTGEVPPRYPLDAR |
| | | (SEQ ID NO 992) |
| | | GATYAFTGSHYWR |
| | | (SEQ ID NO 993) |
| | | GECQSEGVLFFQGNR cam |
| | | (SEQ ID NO 994) |
| | | GECQSEGVLFFQGNRK cam |
| | | (SEQ ID NO 995) |
| | | GGNNLVSGYPK |
| | | (SEQ ID NO 996) |
| | | GPDSVFLIK |
| | | (SEQ ID NO 997) |
| | | LFQEEFPGIPYPPDAAVECHR cam |
| | | (SEQ ID NO 998) |
| | | LWWLDLK |
| | | (SEQ ID NO 999) |
| | | LYVSSGRR |
| | | (SEQ ID NO 1000) |
| | | RLWWLDLK |
| | | (SEQ ID NO 1001) |
| | | SGAQATWTEVSWPHEK |
| | | (SEQ ID NO 1002) |
| | | SGAQATWTEVSWPHEKVDGALCLDK cam |
| | | (SEQ ID NO 1003) |
| | | SLGPNTCSSNGSSLYFIHGPNLYCYSSIDKLNAAK |
| | | cam cam |
| | | (SEQ ID NO 1004) |
| | | SLPQPQKVNSILGCSQ cam |
| | | (SEQ ID NO 1005) |
| | | VWVYPPEKK |
| | | (SEQ ID NO 1006) |
| | | WFWDFATR |
| | | (SEQ ID NO 1007) |
| | | WKNPITSVDAAFR |
| | | (SEQ ID NO 1008) |
| | | WLERYYCFQGNK cam |
| | | (SEQ ID NO 1009) |
| | | YYCFQGNK cam |
| | | (SEQ ID NO 1010) |
| | | YYCFQGNKFLR cam |
| | | (SEQ ID NO 1011) |
| gi\|50082914 | High molecular | ATSQVVAGTKYVIEFIAR |
| | weight kininogen I | (SEQ ID NO 1012) |
| | isoform DeltaD5 | AYFPCIGCVHAISTDSPDLEPVLK cam cam |
| | | (SEQ ID NO 1013) |
| | | CQALDMTEMAR ox cam |
| | | (SEQ ID NO 1014) |
| | | ENEFFIVTQTCK cam |
| | | (SEQ ID NO 1015) |
| | | FPSLHGDCVALPNGDDGECR cam cam |
| | | (SEQ ID NO 1016) |
| | | LISDFPEATSPK |
| | | (SEQ ID NO 1017) |
| | | RENEFFIVTQTCK cam |
| | | (SEQ ID NO 1018) |
| | | RPPGFSPFR |
| | | (SEQ ID NO 1019) |
| | | SGNQYMLHR |
| | | (SEQ ID NO 1020) |
| | | TDGSPTFYSFK |
| | | (SEQ ID NO 1021) |
| | | VIEGTKTDGSPTFYSFK |
| | | (SEQ ID NO 1022) |
| gi\|40715898 | HMW-kininogen-II | AKMDGSATFYSFNYQIK ox |
| | variant | (SEQ ID NO 1023) |
| | | ATSQVVAGTNYVIEFIAR |
| | | (SEQ ID NO 1024) |
| | | CQALDKTIPIR cam |
| | | (SEQ ID NO 1025) |
| | | EGNCSAQRGLAWQDCDFK cam cam |
| | | (SEQ ID NO 1026) |
| | | ENKFFIVTQTCK cam |
| | | (SEQ ID NO 1027) |
| | | FFIVTQTCK cam |
| | | (SEQ ID NO 1028) |
| | | GDCVALPNGDGGECR cam cam |
| | | (SEQ ID NO 1029) |
| | | KATSQVVAGTNYVIEFIAR |
| | | (SEQ ID NO 1030) |
| | | MDGSATFYSFNYQIK ox |
| | | (SEQ ID NO 1031) |
| | | QLPRNVLGAHGSQLAGR |
| | | (SEQ ID NO 1032) |
| | | RPPGFSPFR |
| | | (SEQ ID NO 1033) |
| | | RRPPGFSPFR |
| | | (SEQ ID NO 1034) |
| gi\|31615671 | Ig (A Chain A, Crystal | ASQSISNNLHWYQQK |
| | Structure Of Fab | (SEQ ID NO 1035) |
| | Fragment Of | DIVLTQSPATLSVTPGDSVSLSCR cam |
| | Antibody Hyhel-26 | (SEQ ID NO 1036) |
| | Complexed With | DSTYSMSSTLTLTKDEYER |
| | Lysozyme) | (SEQ ID NO 1037) |
| | | HNSYTCEATHK cam |
| | | (SEQ ID NO 1038) |
| | | QNGVLNSWTDQDSK |
| | | (SEQ ID NO 1039) |
| | | YASQSISGIPSR |
| | | (SEQ ID NO 1040) |
| gi\|4930001 | Ig (A Chain A, | IAVAWYQQKPGQSPK |
| | Idiotope-Anti-Idiotope | (SEQ ID NO 1041) |
| | Fab-Fab Complex) | DSTYSMSSTLTLTKDEYER ox |
| | | (SEQ ID NO 1042) |
| | | FMSTSVGDRVSITCK cam |
| | | (SEQ ID NO 1043) |
| | | HNSYTCEATHK cam |
| | | (SEQ ID NO 1044) |
| | | LLIYWASTR |
| | | (SEQ ID NO 1045) |
| | | QNGVLDSWTDQDSK |
| | | (SEQ ID NO 1046) |
| | | VSITCKASQDVR cam |
| | | (SEQ ID NO 1047) |
| gi\|11514687 | Ig (A Chain A, Lyme | ASQDINKYIAWYQHKPGK |
| | Disease Antigen | (SEQ ID NO 1048) |
| | Ospa In Complex | DSTYSMSSTLTLTKDEYER ox |
| | With Neutralizing | (SEQ ID NO 1049) |
| | Antibody Fab La-2) | HNSYTCEATHK cam |
| | | (SEQ ID NO 1050) |
| | | HNSYTCEATHKTSTSPIVK cam |
| | | (SEQ ID NO 1051) |
| | | QNGVLNSWTDQDSK |
| | | (SEQ ID NO 1052) |
| | | RADAAPTVSIFPPSSEQLTSGGASVVCFLNNFYPK |
| | | cam |
| | | (SEQ ID NO 1053) |
| | | YIAWYQHKPGK |
| | | (SEQ ID NO 1054) |
| gi\|42543442 | Ig (A Chain A, S25-2- | DIVMSQSPSSLAVSAGEK ox |
| | Kdo Monosaccharide | (SEQ ID NO 1055) |
| | Complex) | DSTYSMSSTLTLTKDEYER ox |
| | | (SEQ ID NO 1056) |
| | | HNSYTCEATHK cam |
| | | (SEQ ID NO 1057) |
| | | LLIYWASTR |
| | | (SEQ ID NO 1058) |
| | | NYLAWYQQKPGQSPK |
| | | (SEQ ID NO 1059) |
| | | QNGVLNSWTDQDSK |
| | | (SEQ ID NO 1060) |
| | | TSTSPIVKSFNR |
| | | (SEQ ID NO 1061) |
| gi\|7766934 | Ig (A Chain A, | ADAAPTVSIFPPSSEQLTSGGASVVCFLNNFYPK |
| | Structure Of An | cam |
| | Activity Suppressing | (SEQ ID NO 1062) |
| | Fab Fragment To | DIVLTQSPASLAVSLGQR |
| | Cytochrome P450 | (SEQ ID NO 1063) |
| | Aromatase) | DIVLTQSPASLAVSLGQRATISCR cam |
| | | (SEQ ID NO 1064) |
| | | HNSYTCEATHK cam |
| | | (SEQ ID NO 1065) |
| | | HNSYTCEATHKTSTSPIVK cam |
| | | (SEQ ID NO 1066) |
| | | LLIYLVSNLESGVPAR |
| | | (SEQ ID NO 1067) |
| gi\|27373551 | Ig (antibody variable | DFQPGYNTGLK |
| | domain) | (SEQ ID NO 1068) |
| | | FTISKTSTTVDLK |
| | | (SEQ ID NO 1069) |
| | | GLEYIGFINPRGTPYYASWAK |
| | | (SEQ ID NO 1070) |
| | | GTPYYASWAK |
| | | (SEQ ID NO 1071) |
| | | IWGPGTLVTVSS |
| | | (SEQ ID NO 1072) |
| gi\|1870378 | Ig (Anti-DNA | ASQSISDYLHWYQQK |
| | immunoglobulin light | (SEQ ID NO 1073) |
| | chain IgG) | ASQSISDYLHWYQQKSHESPR |
| | | (SEQ ID NO 1074) |
| | | DIVMTQSPATLSVTPGDR ox |
| | | (SEQ ID NO 1075) |
| | | DIVMTQSPATLSVTPGDRVSLSCR ox cam |
| | | (SEQ ID NO 1076) |
| | | LLIKYASQSISGIPSR |
| | | (SEQ ID NO 1077) |
| | | YASQSISGIPSR |
| | | (SEQ ID NO 1078) |
| gi\|l2002896 | Ig (anti-human | ADAAPTVSIFPPSSEQLTSGGASVVCFLNNFYPK |
| | apolipoprotein A | cam |
| | monoclonal antibody | (SEQ ID NO 1079) |
| | mAb(a)23L kappa | HNSYTCEATHK cam |
| | light chain) | (SEQ ID NO 1080) |
| | | HNSYTCEATHKTSTSPIVK cam |
| | | (SEQ ID NO 1081) |
| | | LLIHYTSTLQPGIPSR |
| | | (SEQ ID NO 1082) |
| | | RADAAPTVSIFPPSSEQLTSGGASVVCFLNNFYPK |
| | | cam |
| | | (SEQ ID NO 1083) |
| | | TFGGGTKLEIK |
| | | (SEQ ID NO 1084) |
| | | YIAWYQHKPGKGPR |
| | | (SEQ ID NO 1085) |
| gi\|349893 | Ig (C Chain C, Fab | DSTYSMSSTLTLTKDEYER |
| | (Igg2a, Kappa) | (SEQ ID NO 1086) |
| | Fragment (26-10) | DVVMTQTPLSLPVSLGDQASISCR cam |
| | Complex With | (SEQ ID NO 1087) |
| | Digoxin) | FSGSGSGTDFTLK |
| | | (SEQ ID NO 1088) |
| | | FSGVPDRFSGSGSGTDFTLK |
| | | (SEQ ID NO 1089) |
| | | HNSYTCEATHK cam |
| | | (SEQ ID NO 1090) |
| | | HNSYTCEATHKTSTSPIVK cam |
| | | (SEQ ID NO 1091) |
| | | QNGVLNSWTDQDSK |
| | | (SEQ ID NO 1092) |
| | | TSTSPIVKSFNR |
| | | (SEQ ID NO 1093) |
| | | VSNRFSGVPDR |
| | | (SEQ ID NO 1094) |
| gi\|47059057 | Ig (gamma-2b- | APQVYILPPPAEQLSR |
| | immunoglobulin) | (SEQ ID NO 1095) |
| | | CPAPNLEGGPSVFIFPPNIKDVLMISLTPK cam ox |
| | | (SEQ ID NO 1096) |
| | | LEPSGPISTINPCPPCKECHK cam cam cam |
| | | (SEQ ID NO 1097) |
| | | SEDTAMYYCAR cam |
| | | (SEQ ID NO 1098) |
| | | TTPPSVYPLAPGCGDTTGSSVTLGCLVK cam cam |
| | | (SEQ ID NO 1099) |
| | | VNNKDLPSPIER |
| | | (SEQ ID NO 1100) |
| | | VVSALPIQHQDWMSGKEFK ox |
| | | (SEQ ID NO 1101) |
| gi\|1806128 | Ig (immunoglobulin | ALPSPIEKTISKPR |
| | constant heavy chain) | (SEQ ID NO 1102) |
| | | APQVYVLPPPAEEMTKK |
| | | (SEQ ID NO 1103) |
| | | ECPPCAAPDLLGGPSVFIFPPK cam cam |
| | | (SEQ ID NO 1104) |
| | | GPVRAPQVYVLPPPAEEMTK |
| | | (SEQ ID NO 1105) |
| | | GSLFACSVVHEGLHNHLTTK cam |
| | | (SEQ ID NO 1106) |
| | | NTATVLDSDGSYFMYSK |
| | | (SEQ ID NO 1107) |
| | | TEQNYKNTATVLDSDGSYFMYSK ox |
| | | (SEQ ID NO 1108) |
| | | TTAPSVYPLAPVCGGTTGSSVTLGCLVK cam cam |
| | | (SEQ ID NO 1109) |
| | | VPITQNPCPPLK cam |
| | | (SEQ ID NO 1110) |
| | | VPITQNPCPPLKECPPCAAPDLLGGPSVFIFPPK cam |
| | | cam cam |
| | | (SEQ ID NO 1111) |
| | | VVSALPIQHQDWMSGK |
| | | (SEQ ID NO 1112) |
| | | VVSALPIQHQDWMSGKEFK |
| | | (SEQ ID NO 1113) |
| gi\|10121892 | Ig (immunoglobulin | ALIYSASYR |
| | IgM MP-18-3-117 | (SEQ ID NO 1114) |
| | kappa light chain) | ASQNVGTNVAWYQQKPGQSPK |
| | | (SEQ ID NO 1115) |
| | | FMSTSVGDRVSVTCK cam |
| | | (SEQ ID NO 1116) |
| | | FMSTSVGDRVSVTCK ox cam |
| | | (SEQ ID NO 1117) |
| | | HNSYTCEATHK cam |
| | | (SEQ ID NO 1118) |
| | | HNSYTCEATHKTSTSPIVK cam |
| | | (SEQ ID NO 1119) |
| | | RADAAPTVSIFPPSSEQLTSGGASVVCFLNNFYPK |
| | | cam |
| | | (SEQ ID NO 1120) |
| gi\|196723 | Ig (immunoglobulin | DVQITQSPSYLAASPGETITINCR cam |
| | kappa-chain VK-1) | (SEQ ID NO 1121) |
| | | DVQITQSPSYLAASPGETITINCRASK cam |
| | | (SEQ ID NO 1122) |
| | | LLIYSGSTLQSGIPSR |
| | | (SEQ ID NO 1123) |
| | | SISKYLAWYQEKPGK |
| | | (SEQ ID NO 1124) |
| | | TNKLLIYSGSTLQSGIPSR |
| | | (SEQ ID NO 1125) |
| | | YLAWYQEKPGK |
| | | (SEQ ID NO 1126) |
| | | YLAWYQEKPGKTNK |
| | | (SEQ ID NO 1127) |
| gi\|18033701 | Ig (immunoglobulin | ANGTPITQGVDTSNPTK |
| | light chain constant | (SEQ ID NO 1128) |
| | region) | EGNKFMASSFLHLTSDQWR |
| | | (SEQ ID NO 1129) |
| | | FMASSFLHLTSDQWR |
| | | (SEQ ID NO 1130) |
| | | SHNSFTCQVTHEGDTVEK cam |
| | | (SEQ ID NO 1131) |
| | | STPTLTVFPPSSEELKENK |
| | | (SEQ ID NO 1132) |
| gi\|13399686 | Ig (L Chain L, 64m-2 | ADAAPTVSIFPPSSEQLTSGGASVVCFLNNFYPK |
| | Antibody Fab | cam |
| | Complexed With | (SEQ ID NO 1133) |
| | D(5ht)(6-4)t) | DSTYSMSSTLTLTKDEYER |
| | | (SEQ ID NO 1134) |
| | | DVLMTQTPLSLPVSLGDQASISCR cam |
| | | (SEQ ID NO 1135) |
| | | FSGSGSGTDFTLK |
| | | (SEQ ID NO 1136) |
| | | FSGVPDRFSGSGSGTDFTLK |
| | | (SEQ ID NO 1137) |
| | | HNSYTCEATHK cam |
| | | (SEQ ID NO 1138) |
| | | QNGVLNSWTDQDSK |
| | | (SEQ ID NO 1139) |
| | | RADAAPTVSIFPPSSEQLTSGGASVVCFLNNFYPK |
| | | cam |
| | | (SEQ ID NO 1140) |
| | | SSQSIVHSNGNTYLEWYLQKPGQSPK |
| | | (SEQ ID NO 1141) |
| | | VSNRFSGVPDR |
| | | (SEQ ID NO 1142) |
| gi\|3212470 | Ig (L Chain L, Anti | ADAAPTVSIFPPSSEQLTSGGASVVCFLNNFYPK |
| | Taq Fab Tp7) | cam |
| | | (SEQ ID NO 1143) |
| | | DEYERHNSYTCEATHK cam |
| | | (SEQ ID NO 1144) |
| | | DIQMTQSPAIMSASPGEK ox ox |
| | | (SEQ ID NO 1145) |
| | | DSTYSMSSTLTLTKDEYER |
| | | (SEQ ID NO 1146) |
| | | FSGSGSGTSYSLTISR |
| | | (SEQ ID NO 1147) |
| | | HNSYTCEATHK cam |
| | | (SEQ ID NO 1148) |
| | | HNSYTCEATHKTSTSPIVK cam |
| | | (SEQ ID NO 1149) |
| | | LLIYDSTNLASGVPVR |
| | | (SEQ ID NO 1150) |
| | | RADAAPTVSIFPPSSEQLTSGGASVVCFLNNFYPK |
| | | cam |
| | | (SEQ ID NO 1151) |
| gi\|5542523 | Ig (L Chain L, | ADAAPTVSIFPPSSEQLTSGGASVVCFLNNFYPK |
| | Bactericidal Antibody | cam |
| | Against Neisseria | (SEQ ID NO 1152) |
| | Meningitidis) | DIVMTQTPLSLPVSLGDKASISCR cam |
| | | (SEQ ID NO 1153) |
| | | DIVMTQTPLSLPVSLGDKASISCR ox cam |
| | | (SEQ ID NO 1154) |
| | | DSTYSMSSTLTLTKDEYER ox |
| | | (SEQ ID NO 1155) |
| | | FSGSGSGTDFTLK |
| | | (SEQ ID NO 1156) |
| | | FSGVPDRFSGSGSGTDFTLK |
| | | (SEQ ID NO 1157) |
| | | HNSYTCEATHK cam |
| | | (SEQ ID NO 1158) |
| | | HNSYTCEATHKTSTSPIVK cam |
| | | (SEQ ID NO 1159) |
| | | QNGVLNSWTDQDSK |
| | | (SEQ ID NO 1160) |
| | | TFGGGTKLEIK |
| | | (SEQ ID NO 1161) |
| | | VSNRFSGVPDR |
| | | (SEQ ID NO 1162) |
| gi\|16975338 | Ig (L Chain L, Crystal | ADAAPTVSIFPPSSEQLTSGGASVVCFLNNFYPK |
| | Structure Of | cam |
| | Immunoglobulin Fab | (SEQ ID NO 1163) |
| | Fragment Complexed | ASGNIHNYLAWYQQK |
| | With 17-Beta- | (SEQ ID NO 1164) |
| | Estradiol) | DEYERHNSYTCEATHK cam |
| | | (SEQ ID NO 1165) |
| | | DIQMTQSPASLSASVGETVTITCR ox cam |
| | | (SEQ ID NO 1166) |
| | | DSTYSMSSTLTLTKDEYER |
| | | (SEQ ID NO 1167) |
| | | DSTYSMSSTLTLTKDEYER ox |
| | | (SEQ ID NO 1168) |
| | | FSGSGSGTQYSLK |
| | | (SEQ ID NO 1169) |
| | | HNSYTCEATHK cam |
| | | (SEQ ID NO 1170) |
| | | HNSYTCEATHKTSTSPIVK cam |
| | | (SEQ ID NO 1171) |
| | | QNGVLNSWTDQDSK |
| | | (SEQ ID NO 1172) |
| | | SPQLLVYNAK |
| | | (SEQ ID NO 1173) |
| gi\|18655521 | Ig (L Chain L, Crystal | ADAAPTVSIFPPSSEQLTSGGASVVCFLNNFYPK |
| | Structure Of The Fab | cam |
| | Fragment Of The | (SEQ ID NO 1174) |
| | Mouse Anti- Human | ASQSVDYDGDSYMNWYQQKPGQPPK |
| | Fas Antibody Hfe7a) | (SEQ ID NO 1175) |
| | | ASQSVDYDGDSYMNWYQQKPGQPPK ox |
| | | (SEQ ID NO 1176) |
| | | DIVLTQSPASLAVSLGQR |
| | | (SEQ ID NO 1177) |
| | | DSTYSMSSTLTLTKDEYER |
| | | (SEQ ID NO 1178) |
| | | DSTYSMSSTLTLTKDEYER ox |
| | | (SEQ ID NO 1179) |
| | | HNSYTCEATHK cam |
| | | (SEQ ID NO 1180) |
| | | LLIYAASNLESGIPAR |
| | | (SEQ ID NO 1181) |
| gi\|1942810 | Ig (L Chain L, Fab | ADAAPTVSIFPPSSEQLTSGGASVVCFLNNFYPK |
| | Fragment Of A | cam |
| | Neutralizing Antibody | (SEQ ID NO 1182) |
| | Directed Against An | DVVMTQTPLTLSVTIGQPASISCK cam |
| | Epitope Of Gp41 | (SEQ ID NO 1183) |
| | From Hiv-1) | DVVMTQTPLTLSVTIGQPASISCK ox cam |
| | | (SEQ ID NO 1184) |
| | | FTGSGSGTDFTLK |
| | | (SEQ ID NO 1185) |
| | | HNSYTCEATHK cam |
| | | (SEQ ID NO 1186) |
| | | HNSYTCEATHKTSTSPIVK cam |
| | | (SEQ ID NO 1187) |
| | | LDSGVPDRFTGSGSGTDFTLK |
| | | (SEQ ID NO 1188) |
| | | LIYLVSKLDSGVPDR |
| | | (SEQ ID NO 1189) |
| | | QNGVLNSWTDQDSK |
| | | (SEQ ID NO 1190) |
| | | SSQSLLDSDGKTYLNWLLQRPGQSPK |
| | | (SEQ ID NO 1191) |
| | | TFGGGTKLEIK |
| | | (SEQ ID NO 1192) |
| | | VEAEDLGVYYCWQGTHFPR cam |
| | | (SEQ ID NO 1193) |
| gi\|7546516 | Ig (L Chain L, Fab | ADAAPTVSIFPPSSEQLTSGGASVVCFLNNFYPK |
| | Fragment Of | cam |
| | Neutralising | (SEQ ID NO 1194) |
| | Monoclonal Antibody | DIVLTQSPASLAVSLGQR |
| | 4c4 Complexed With | (SEQ ID NO 1195) |
| | G-H Loop From | HNSYTCEATHK cam |
| | Fmdv) | (SEQ ID NO 1196) |
| | | LLIYRASNLESGIPAR |
| | | (SEQ ID NO 1197) |
| | | RADAAPTVSIFPPSSEQLTSGGASVVCFLNNFYPK |
| | | cam |
| | | (SEQ ID NO 1198) |
| gi\|17943084 | Ig (L Chain L, | DSTYSMSSTLTLTKDEYER |
| | Structural Basis For | (SEQ ID NO 1199) |
| | Disfavored | DSTYSMSSTLTLTKDEYER ox |
| | Elimination Reaction | (SEQ ID NO 1200) |
| | In Catalytic Antibody | EVVMTQSPLSLPVSLGDQASISCR cam |
| | 1d4) | (SEQ ID NO 1201) |
| | | EVVMTQSPLSLPVSLGDQASISCR ox cam |
| | | (SEQ ID NO 1202) |
| | | FSGSGSGTDFTLK |
| | | (SEQ ID NO 1203) |
| | | FSGVPDRFSGSGSGTDFTLK |
| | | (SEQ ID NO 1204) |
| | | HNSYTCEATHK cam |
| | | (SEQ ID NO 1205) |
| | | HNSYTCEATHKTSTSPIVK cam |
| | | (SEQ ID NO 1206) |
| | | QNGVLNSWTDQDSK |
| | | (SEQ ID NO 1207) |
| | | SSQSLVHSNGNTYLHWYLQKPGQSPK |
| | | (SEQ ID NO 1208) |
| | | TSTSPIVKSFNR |
| | | (SEQ ID NO 1209) |
| | | VSNRFSGVPDR |
| | | (SEQ ID NO 1210) |
| gi\|2624743 | Ig (L Chain L, | DEYERHNSYTCEATHK cam |
| | Structure Of A | (SEQ ID NO 1211) |
| | Catalytic Antibody, | DIVMTQSPLTLSVTIGQPASISCKSSQSLLYSNGK ox |
| | Igg2a Fab Fragment) | cam |
| | | (SEQ ID NO 1212) |
| | | DSTYSMSSTLTLTKDEYER |
| | | (SEQ ID NO 1213) |
| | | DSTYSMSSTLTLTKDEYER ox |
| | | (SEQ ID NO 1214) |
| | | FTGSGSGTDFTLK |
| | | (SEQ ID NO 1215) |
| | | HNSYTCEATHK cam |
| | | (SEQ ID NO 1216) |
| | | LDSGVPDRFTGSGSGTDFTLK |
| | | (SEQ ID NO 1217) |
| | | QNGVLNSWTDQDSK |
| | | (SEQ ID NO 1218) |
| gi\|32263981 | Ig (mAb | FSGSGSGTSYSLTISR |
| | immunoglobulin light | (SEQ ID NO 1219) |
| | chain variable region) | FSGSGSGTSYSLTISRMEAEDAATYYCQQR ox cam |
| | | (SEQ ID NO 1220) |
| | | MEAEDAATYYCQQR cam |
| | | (SEQ ID NO 1221) |
| | | MEAEDAATYYCQQR ox cam |
| | | (SEQ ID NO 1222) |
| | | QIVLTQSPAIMSASPGEK ox |
| | | (SEQ ID NO 1223) |
| | | SSYPFTFGSGTK |
| | | (SEQ ID NO 1224) |
| | | SSYPFTFGSGTKLEIK |
| | | (SEQ ID NO 1225) |
| gi\|18568342 | Ig (monoclonal | CDIQMTQTTSALSASLGDR cam |
| | antibody BBK-2 light | (SEQ ID NO 1226) |
| | chain) | CDIQMTQTTSALSASLGDR cam ox |
| | | (SEQ ID NO 1227) |
| | | DSTYSMSSTLTLTKDEYER ox |
| | | (SEQ ID NO 1228) |
| | | HNSYTCEATHK cam |
| | | (SEQ ID NO 1229) |
| | | HNSYTCEATHKTSTSPIVK cam |
| | | (SEQ ID NO 1230) |
| | | MRFSAQFLGLLLLCFQGTR ox cam |
| | | (SEQ ID NO 1231) |
| | | NLEQEDVATYFCQQGYTLPYTFGGGTKLEIK cam |
| | | (SEQ ID NO 1232) |
| | | QNGVLNSWTDQDSK |
| | | (SEQ ID NO 1233) |
| gi\|52382 | Ig (mu(b) | DGKLVESGFTTDPVTIENK |
| | immunoglobulin | (SEQ ID NO 1234) |
| | heavy chain) | DLHVPIPAVAEMNPNVNVFVPPR ox |
| | | (SEQ ID NO 1235) |
| | | EFVCTVTHR cam |
| | | (SEQ ID NO 1236) |
| | | EQLNLRESATVTCLVK cam |
| | | (SEQ ID NO 1237) |
| | | FISKPNEVHK |
| | | (SEQ ID NO 1238) |
| | | GFSPADISVQWLQR |
| | | (SEQ ID NO 1239) |
| | | GVASVCVEDWNNR cam |
| | | (SEQ ID NO 1240) |
| | | GVASVCVEDWNNRK cam |
| | | (SEQ ID NO 1241) |
| | | HPPAVYLLPPAR |
| | | (SEQ ID NO 1242) |
| | | KEFVCTVTHR cam |
| | | (SEQ ID NO 1243) |
| | | LICEATNFTPKPITVSWLK cam |
| | | (SEQ ID NO 1244) |
| | | LVESGFTTDPVTIENK |
| | | (SEQ ID NO 1245) |
| | | LVESGFTTDPVTIENKGSTPQTYK |
| | | (SEQ ID NO 1246) |
| | | NKDLHVPIPAVAEMNPNVNVFVPPR |
| | | (SEQ ID NO 1247) |
| | | NKDLHVPIPAVAEMNPNVNVFVPPR ox |
| | | (SEQ ID NO 1248) |
| | | NLVAMGCLAR cam |
| | | (SEQ ID NO 1249) |
| | | NLVAMGCLAR ox cam |
| | | (SEQ ID NO 1250) |
| | | SILEGSDEYLVCK cam |
| | | (SEQ ID NO 1251) |
| | | TGGKYLATSQVLLSPK |
| | | (SEQ ID NO 1252) |
| | | YLATSQVLLSPK |
| | | (SEQ ID NO 1253) |
| gi\|7439167 | Ig (PC4436 | APQVYTIPPPKEQMAK |
| | monoclonal antibody | (SEQ ID NO 1254) |
| | 13-1 heavy chain) | APQVYTIPPPKEQMAK ox |
| | | (SEQ ID NO 1255) |
| | | CRVNSAAFPAPIEK cam |
| | | (SEQ ID NO 1256) |
| | | DCGCKPCICTVPEVSSVFIFPPKPK cam cam cam |
| | | cam |
| | | (SEQ ID NO 1257) |
| | | DDSKSSVYLQMNR |
| | | (SEQ ID NO 1258) |
| | | GRPKAPQVYTIPPPK |
| | | (SEQ ID NO 1259) |
| | | SNWEAGNTFTCSVLHEGLHNHHTEK cam |
| | | (SEQ ID NO 1260) |
| | | TTPPSVYPLAPGSAAQTNSMVTLGCLVK ox cam |
| | | (SEQ ID NO 1261) |
| | | VNSAAFPAPIEK |
| | | (SEQ ID NO 1262) |
| | | VNSAAFPAPIEKTISK |
| | | (SEQ ID NO 1263) |
| gi\|15824610 | Ig (Pterin-mimicking | DIVLTQSPASLAVSLGQR |
| | anti-idiotope kappa | (SEQ ID NO 1264) |
| | chain variable region) | FSGSGSGTDFTLNIHPVEEEDAATYYCQHSR cam |
| | | (SEQ ID NO 1265) |
| | | LLIYLASNLESGVPAR |
| | | (SEQ ID NO 1266) |
| | | ELPYTFGGGTKLEIK |
| | | (SEQ ID NO 1267) |
| | | DIVLTQSPASLAVSLGQRATISCR cam |
| | | (SEQ ID NO 68) |
| gi\|780265 | Ig gamma-1 chain C | APQVYTIPPPKEQMAK ox |
| | region (15C5) | (SEQ ID NO 1269) |
| | (fragment) | CRVNSAAFPAPIEK cam |
| | | (SEQ ID NO 1270) |
| | | NTQPIMDTDGSYFVYSKLNVQK ox |
| | | (SEQ ID NO 1271) |
| | | SNWEAGNTFTCSVLHEGLHNHHTEK cam |
| | | (SEQ ID NO 1272) |
| | | SVSELPIMHQDWLNGK |
| | | (SEQ ID NO 1273) |
| | | SVSELPIMHQDWLNGK ox |
| | | (SEQ ID NO 1274) |
| | | VNSAAFPAPIEK |
| | | (SEQ ID NO 1275) |
| | | VNSAAFPAPIEKTISK |
| | | (SEQ ID NO 1276) |
| gi\|1799551 | Ig gamma-chain, | AQTPQVYTIPPPR |
| | secrete-type | (SEQ ID NO 1277) |
| | | AQTPQVYTIPPPREQMSK |
| | | (SEQ ID NO 1278) |
| | | AQTPQVYTIPPPREQMSK ox |
| | | (SEQ ID NO 1279) |
| | | DALMISLTPK ox |
| | | (SEQ ID NO 1280) |
| | | EVHTAWTQPR |
| | | (SEQ ID NO 1281) |
| | | GYFPEPVTVK |
| | | (SEQ ID NO 1282) |
| | | GYFPEPVTVKWNYGALSSGVR |
| | | (SEQ ID NO 1283) |
| | | NTPPILDSDGTYFLYSK |
| | | (SEQ ID NO 1284) |
| | | VNNKALPAPIER |
| | | (SEQ ID NO 1285) |
| | | VVSALPIQHQDWMR |
| | | (SEQ ID NO 1286) |
| | | VVSALPIQHQDWMR ox |
| | | (SEQ ID NO 1287) |
| | | WNYGALSSGVR |
| | | (SEQ ID NO 1288) |
| gi\|223428 | Ig H-C allotype | APQVYILPPPAEQLSR |
| | gamma2b | (SEQ ID NO 1289) |
| | | APQVYILPPPAEQLSRK |
| | | (SEQ ID NO 1290) |
| | | CPAPNLEGGPSVFIFPPNIK cam |
| | | (SEQ ID NO 1291) |
| | | CPAPNLEGGPSVFIFPPNIKDVLMISLTPK cam |
| | | (SEQ ID NO 1292) |
| | | CPAPNLEGGPSVFIFPPNIKDVLMISLTPK cam ox |
| | | (SEQ ID NO 1293) |
| | | GLVRAPQVYILPPPAEQLSR |
| | | (SEQ ID NO 1294) |
| | | HEGLKNYYLK |
| | | (SEQ ID NO 1295) |
| | | ISWFVNNVEVHTAQTQTHR |
| | | (SEQ ID NO 1296) |
| | | LEPSGPISTINPCPPCKECHK cam cam cam |
| | | (SEQ ID NO 1297) |
| | | TDSFSCNVR cam |
| | | (SEQ ID NO 1298) |
| | | TDSFSCNVRHEGLK cam |
| | | (SEQ ID NO 1299) |
| | | TTPPSVYPLAPGCGDTTGSSVTLGCLVK cam cam |
| | | (SEQ ID NO 1300) |
| | | VNNKDLPSPIER |
| | | (SEQ ID NO 1301) |
| | | VTCVVVDVSEDDPDVR cam |
| | | (SEQ ID NO 1302) |
| | | VVSALPIQHQDWMSGK |
| | | (SEQ ID NO 1303) |
| | | VVSALPIQHQDWMSGK ox |
| | | (SEQ ID NO 1304) |
| | | VVSALPIQHQDWMSGKEFK |
| | | (SEQ ID NO 1305) |
| | | VVSALPIQHQDWMSGKEFK o |
| | | (SEQ ID NO 1306) |
| | | WEKTDSFSCNVR cam |
| | | (SEQ ID NO 1307) |
| gi\|224008 | Ig J chain | CYTTMVPLR cam |
| | | (SEQ ID NO 1308) |
| | | CYTTMVPLR cam ox |
| | | (SEQ ID NO 1309) |
| | | CYTTMVPLRYHGETK cam |
| | | (SEQ ID NO 1310) |
| | | CYTTMVPLRYHGETK cam ox |
| | | (SEQ ID NO 1311) |
| | | IIPSTEDPNEDIVER |
| | | (SEQ ID NO 1312) |
| | | IIPSTEDPNEDIVERNIR |
| | | (SEQ ID NO 1313) |
| | | MVQAALTPDSCYPD ox cam |
| | | (SEQ ID NO 1314) |
| | | NFVYHLSDVCK cam |
| | | (SEQ ID NO 1315) |
| | | NFVYHLSDVCKK cam |
| | | (SEQ ID NO 1316) |
| gi\|12832551 | Ig K (unnamed | ADAAPTVSIFPPSSEQLTSGGASVVCFLNNFYPK |
| | protein product) | cam |
| | | (SEQ ID NO 1317) |
| | | ASENIYSNLAWYQQK |
| | | (SEQ ID NO 1318) |
| | | ASENIYSNLAWYQQKQGK |
| | | (SEQ ID NO 1319) |
| | | HNSYTCEATHK cam |
| | | (SEQ ID NO 1320) |
| | | HNSYTCEATHKTSTSPIVK cam |
| | | (SEQ ID NO 1321) |
| | | QGKSPQLLVYAATNLADGVPSR |
| | | (SEQ ID NO 1322) |
| | | RADAAPTVSIFPPSSEQLTSGGASVVCFLNNFYPK |
| | | cam |
| | | (SEQ ID NO 1323) |
| | | SPQLLVYAATNLADGVPSR |
| | | (SEQ ID NO 1324) |
| gi\|896077 | Ig kappa chain | ASSSVSSSYLHWYQQK |
| | | (SEQ ID NO 1325) |
| | | ENVLTQSPAIMSASPGEK ox |
| | | (SEQ ID NO 1326) |
| | | ENVLTQSPAIMSASPGEKVTMTCR ox cam |
| | | (SEQ ID NO 1327) |
| | | ENVLTQSPAIMSASPGEKVTMTCR ox ox cam |
| | | (SEQ ID NO 1328) |
| | | LWIYSTSNLASGVPAR |
| | | (SEQ ID NO 1329) |
| | | SGASPKLWIYSTSNLASGVPAR |
| | | (SEQ ID NO 1330) |
| gi\|896089 | Ig kappa chain | DIVMSQSPSSLAVSVGEK ox |
| | | (SEQ ID NO 1331) |
| | | ESGVPDRFTGSGSGTDFTLTISSVK |
| | | (SEQ ID NO 1332) |
| | | FTGSGSGTDFTLTISSVK |
| | | (SEQ ID NO 1333) |
| | | LLIYWASTR |
| | | (SEQ ID NO 1334) |
| | | NYLAWYQQKPGQSPK |
| | | (SEQ ID NO 1335) |
| | | SSQSLLYSSNQK |
| | | (SEQ ID NO 1336) |
| gi\|896103 | Ig kappa chain | ASQDIGSSLNWLQQEPDGTIKR |
| | | (SEQ ID NO 1337) |
| | | DIQMTQSPSSLSASLGER |
| | | (SEQ ID NO 1338) |
| | | DIQMTQSPSSLSASLGER ox |
| | | (SEQ ID NO 1339) |
| | | LIYATSSLDSGVPK |
| | | (SEQ ID NO 1340) |
| | | LIYATSSLDSGVPKR |
| | | (SEQ ID NO 1341) |
| gi\|896107 | Ig kappa chain | ADAAPTVSIFPPSSEQLTSGGASVVCFLNNFYPK |
| | | cam |
| | | (SEQ ID NO 1342) |
| | | ASENIYSNLAWYQQK |
| | | (SEQ ID NO 1343) |
| | | ASENIYSNLAWYQQKQGK |
| | | (SEQ ID NO 1344) |
| | | HNSYTCEATHK cam |
| | | (SEQ ID NO 1345) |
| | | HNSYTCEATHKTSTSPIVK cam |
| | | (SEQ ID NO 1346) |
| | | QGKSPQLLVYAATNLADGVPSR |
| | | (SEQ ID NO 1347) |
| | | RADAAPTVSIFPPSSEQLTSGGASVVCFLNNFYPK |
| | | cam |
| | | (SEQ ID NO 1348) |
| | | SPQLLVYAATNLADGVPSR |
| | | (SEQ ID NO 1349) |
| gi\|7513693 | Ig kappa chain | ADAAPTVSIFPPSSEQLTSGGASVVCFLNNFYPK |
| | (Mab03-1) | cam |
| | | (SEQ ID NO 1350) |
| | | DEYERHNSYTCEATHK cam |
| | | (SEQ ID NO 1351) |
| | | DIVMTQSPSSLAMSVGQK |
| | | (SEQ ID NO 1352) |
| | | DIVMTQSPSSLAMSVGQK ox |
| | | (SEQ ID NO 1353) |
| | | DIVMTQSPSSLAMSVGQK ox ox |
| | | (SEQ ID NO 1354) |
| | | DSTYSMSSTLTLTKDEYER ox |
| | | (SEQ ID NO 1355) |
| | | HNSYTCEATHK cam |
| | | (SEQ ID NO 1356) |
| | | HNSYTCEATHKTSTSPIVK cam |
| | | (SEQ ID NO 1357) |
| | | LLVYFASTR |
| | | (SEQ ID NO 1358) |
| | | NYLAWYQQKPGQSPK |
| | | (SEQ ID NO 1359) |
| | | SSQSLLNSRNQK |
| | | (SEQ ID NO 1360) |
| gi\|110429 | Ig kappa chain V | ASQDINKYIAWYQHKPGK |
| | region (9.42) | (SEQ ID NO 1361) |
| | | DIQMTQSPSSLSASLGGK |
| | | (SEQ ID NO 1362) |
| | | DIQMTQSPSSLSASLGGK ox |
| | | (SEQ ID NO 1363) |
| | | LLIHYTSTLQPGIPSR |
| | | (SEQ ID NO 1364) |
| | | YIAWYQHKPGK |
| | | (SEQ ID NO 1365) |
| | | YIAWYQHKPGKGPR |
| | | (SEQ ID NO 1366) |
| gi\|49258884 | Ig kappa chain V | ADAAPTVSIFPPSSEQLTSGGASVVCFLNNFYPK |
| | region (D444) | cam |
| | | (SEQ ID NO 1367) |
| | | ASQSIGTDIHWYQQR |
| | | (SEQ ID NO 1368) |
| | | DILLTQSPAILSVSPGER |
| | | (SEQ ID NO 1369) |
| | | HNSYTCEATHK cam |
| | | (SEQ ID NO 1370) |
| | | LLIKYASESISGIPSR |
| | | (SEQ ID NO 1371) |
| | | RADAAPTVSIFPPSSEQLTSGGASVVCFLNNFYPK |
| | | cam |
| | | (SEQ ID NO 1372) |
| | | YASESISGIPSR |
| | | (SEQ ID NO 1373) |
| gi\|930226 | Ig kappa chain V | ASQDIKSYLSWYQQKPWK |
| | region (hybridoma | (SEQ ID NO 1374) |
| | NC19-E11) | DIKMTQSPSSMYASLGER ox |
| | | (SEQ ID NO 1375) |
| | | DIKMTQSPSSMYASLGER ox ox |
| | | (SEQ ID NO 1376) |
| | | MTQSPSSMYASLGER ox |
| | | (SEQ ID NO 1377) |
| | | MTQSPSSMYASLGER ox ox |
| | | (SEQ ID NO 1378) |
| | | SYLSWYQQKPWK |
| | | (SEQ ID NO 1379) |
| | | SYLSWYQQKPWKSPK |
| | | (SEQ ID NO 1380) |
| | | TLIYYATSLADGVPSR |
| | | (SEQ ID NO 1381) |
| gi\|125796 | Ig kappa chain V-III | ASESVDNYGISFMNWFQQKPGQPPK |
| | region PC 2880/PC | (SEQ ID NO 1382) |
| | 1229 | ASESVDNYGISFMNWFQQKPGQPPK ox |
| | | (SEQ ID NO 1383) |
| | | DIVLTQSPASLAVSLGQR |
| | | (SEQ ID NO 1384) |
| | | EVPWTFGGGTK |
| | | (SEQ ID NO 1385) |
| | | EVPWTFGGGTKLEIK |
| | | (SEQ ID NO 1386) |
| | | LLIYAASNQGSGVPAR |
| | | (SEQ ID NO 1387) |
| gi\|197064 | Ig kappa chain V- | ASQDISNYLNWYQQKPDGTVK |
| | region (V-Jk1) protein | (SEQ ID NO 1388) |
| | | DIQMTQTTSSLSASLGDR ox |
| | | (SEQ ID NO 1389) |
| | | DIQMTQTTSSLSASLGDRVTISCR cam |
| | | (SEQ ID NO 1390) |
| | | DIQMTQTTSSLSASLGDRVTISCR ox cam |
| | | (SEQ ID NO 1391) |
| | | FSGSGSGTDYSLTISNLEQEDIATYFCQQGNTLPR |
| | | cam |
| | | (SEQ ID NO 1392) |
| | | LLIYYTSRLHSGVPSR |
| | | (SEQ ID NO 1393) |
| | | TFGGGTKLEIK |
| | | (SEQ ID NO 1394) |
| gi\|1613779 | Ig kappa light chain | ADAAPTVSIFPPSSEQLTSGGASVVCFLNNFYPK |
| | | cam |
| | | (SEQ ID NO 1395) |
| | | ANRLVDGVPSR |
| | | (SEQ ID NO 1396) |
| | | DIKMTQSPSSMYASLGER |
| | | (SEQ ID NO 1397) |
| | | DIKMTQSPSSMYASLGER ox |
| | | (SEQ ID NO 1398) |
| | | DIKMTQSPSSMYASLGER ox ox |
| | | (SEQ ID NO 1399) |
| | | HNSYTCEATHK cam |
| | | (SEQ ID NO 1400) |
| | | HNSYTCEATHKTSTSPIVK cam |
| | | (SEQ ID NO 1401) |
| | | MTQSPSSMYASLGER |
| | | (SEQ ID NO 1402) |
| | | MTQSPSSMYASLGER ox |
| | | (SEQ ID NO 1403) |
| | | MTQSPSSMYASLGER ox ox |
| | | (SEQ ID NO 1404) |
| gi\|284924 | Ig light chain V region | ASENIYSYLAWYQQK |
| | (clone 185-c1) | (SEQ ID NO 1405) |
| | | DIQMTQSPASLSASVGETVTITCR ox cam |
| | | (SEQ ID NO 6 |
| | | FSGSGSGTQFSLK |
| | | (SEQ ID NO 1407) |
| | | QGKSPQLLVYNAK |
| | | (SEQ ID NO 1408) |
| | | SPQLLVYNAK |
| | | (SEQ ID NO 1409) |
| | | TLAEGVPSRFSGSGSGTQFSLK |
| | | (SEQ ID NO 1410) |
| gi\|494164 | Igg2a Fab Fragment | ADAAPTVSIFPPSSEQLTSGGASVVCFLNNFYPK |
| | (Fab 179) | cam |
| | | (SEQ ID NO 1411) |
| | | DIVMTQSPSSLTVTAGEK ox |
| | | (SEQ ID NO 1412) |
| | | HNSYTCEATHK cam |
| | | (SEQ ID NO 1413) |
| | | HNSYTCEATHKTSTSPIVK cam |
| | | (SEQ ID NO 1414) |
| | | NYLTWYQQKPGQPPK |
| | | (SEQ ID NO 1415) |
| gi\|229901 | Igg2b, Kappa | ADAAPTVSIFPPSSEQLTSGGASVVCFLNNFYPK |
| | | cam |
| | | (SEQ ID NO 1416) |
| | | ASQDISNYLNWYQQKPDGTVK |
| | | (SEQ ID NO 1417) |
| | | DIQMTQTTSSLSASLGDR |
| | | (SEQ ID NO 1418) |
| | | DIQMTQTTSSLSASLGDR ox |
| | | (SEQ ID NO 1419) |
| | | DIQMTQTTSSLSASLGDRVTISCR cam |
| | | (SEQ ID NO 1420) |
| | | DIQMTQTTSSLSASLGDRVTISCR ox cam |
| | | (SEQ ID NO 1421) |
| | | DSTYSMSSTLTLTKDEYER ox |
| | | (SEQ ID NO 1422) |
| | | HNSYTCEATHK cam |
| | | (SEQ ID NO 1423) |
| | | HNSYTCEATHKTSTSPIVK cam |
| | | (SEQ ID NO 1424) |
| | | LLIYYTSR |
| | | (SEQ ID NO 1425) |
| | | QNGVLNSWTDQDSK |
| | | (SEQ ID NO 1426) |
| | | TFGGGTKLEIK |
| | | (SEQ ID NO 1427) |
| gi\|62204734 | Inter alpha-trypsin | ADAVQEATFQVELPR |
| | inhibitor, heavy chain | (SEQ ID NO 1428) |
| | 4 | AHGGTNINNAVLLAVELLDR |
| | | (SEQ ID NO 1429) |
| | | AHGGTNINNAVLLAVELLDRSNQAELLPSK |
| | | (SEQ ID NO 1430) |
| | | DIVWEPPVEPDNTKR |
| | | (SEQ ID NO 1431) |
| | | FKPTLSQQQK |
| | | (SEQ ID NO 1432) |
| | | GSEMVVAGKLQDQGPDVLLAK ox |
| | | (SEQ ID NO 1433) |
| | | ILKDLSPQDQFNLIEFSGEANQWK |
| | | (SEQ ID NO 1434) |
| | | IRAHGGTNINNAVLLAVELLDR |
| | | (SEQ ID NO 1435) |
| | | ITFELIYQELLQR |
| | | (SEQ ID NO 1436) |
| | | ITFELIYQELLQRR |
| | | (SEQ ID NO 1437) |
| | | LFVDPSQGLEVTGK |
| | | (SEQ ID NO 1438) |
| | | LPLAAQAHPFRPPVR |
| | | (SEQ ID NO 1439) |
| | | LWALLTIQQQLEQR |
| | | (SEQ ID NO 1440) |
| | | MLSLPSVAQYPADPHLVVTEK ox |
| | | (SEQ ID NO 1441) |
| | | NTEYKWK |
| | | (SEQ ID NO 1442) |
| | | QSLVQATEENLNKAVNYASR |
| | | (SEQ ID NO 1443) |
| | | QTEKFEVSVNVAPGSK |
| | | (SEQ ID NO 1444) |
| | | QYSAAVGRGESAGIVK |
| | | (SEQ ID NO 1445) |
| | | RLGMYELLLK |
| | | (SEQ ID NO 1446) |
| | | RLGMYELLLK ox |
| | | (SEQ ID NO 1447) |
| | | SQSEQDTVLNGDFIVR |
| | | (SEQ ID NO 1448) |
| | | SVSLIILLTDGDPTVGETNPTIIQNNVR |
| | | (SEQ ID NO 1449) |
| | | TLFSVLPGLK |
| | | (SEQ ID NO 1450) |
| | | TVKVQGVDYLATR |
| | | (SEQ ID NO 1451) |
| | | VQGVDYLATR |
| | | (SEQ ID NO 1452) |
| | | VVNRADAVQEATFQVELPR |
| | | (SEQ ID NO 1453) |
| | | YIFHNFMER |
| | | (SEQ ID NO 1454) |
| | | YIFHNFMER ox |
| | | (SEQ ID NO 1455) |
| | | YKFQHHFK |
| | | (SEQ ID NO 1456) |
| gi\|16418335 | Leucine-rich alpha-2- | CAGPEAMKGQR cam |
| | glycoprotein | (SEQ ID NO 1457) |
| | | CAGPEAMKGQR cam ox |
| | | (SEQ ID NO 1458) |
| | | DMQDGFDISHNPWICDKNLADLCR ox cam cam |
| | | (SEQ ID NO 1459) |
| | | ELHLSSNRLQALSPELLAPVPR |
| | | (SEQ ID NO 1460) |
| | | LEDSLLAPQPFLR |
| | | (SEQ ID NO 1461) |
| | | LHLEGNRLQR |
| | | (SEQ ID NO 1462) |
| | | LQALSPELLAPVPR |
| | | (SEQ ID NO 1463) |
| | | LQRLEDSLLAPQPFLR |
| | | (SEQ ID NO 1464) |
| gi\|21594125 | Lifr protein (leukemia | AEIQLSKNDYIISVVAR |
| | inhibitory factor | (SEQ ID NO 1465) |
| | receptor) | GAEDSTYHVAVDKLNPYTAYTFR |
| | | (SEQ ID NO 1466) |
| | | HLTTEATPSKGPDTWR |
| | | (SEQ ID NO 1467) |
| | | IASMEIPNDDITVEQAVGLGNR ox |
| | | (SEQ ID NO 1468) |
| | | INLLCQIEICK cam cam |
| | | (SEQ ID NO 1469) |
| | | LSCETHDLKEIICSWNPGR cam cam |
| | | (SEQ ID NO 1470) |
| | | NDYIISVVAR |
| | | (SEQ ID NO 1471) |
| | | NTEYTLFESISGK |
| | | (SEQ ID NO 1472) |
| | | SEPCLLDWR cam |
| | | (SEQ ID NO 1473) |
| | | YNFYLYGCTNQGYQLLR cam |
| | | (SEQ ID NO 1474) |
| gi\|8569601 | Major urinary protein | AGEYSVTYDGFNTFTIPK |
| | 1 | (SEQ ID NO 1475) |
| | | DGETFQLMGLYGR ox |
| | | (SEQ ID NO 1476) |
| | | EEASSTGRNFNVEK |
| | | (SEQ ID NO 1477) |
| | | EKIEDNGNFR |
| | | (SEQ ID NO 1478) |
| | | ENIIDLSNANR |
| | | (SEQ ID NO 1479) |
| | | FAQLCEEHGILR cam |
| | | (SEQ ID NO 1480) |
| | | FAQLCEEHGILRENIIDLSNANR cam |
| | | (SEQ ID NO 1481) |
| | | IEDNGNFRLFLEQIHVLEK |
| | | (SEQ ID NO 1482) |
| | | INGEWHTIILASDKR |
| | | (SEQ ID NO 1483) |
| | | LFLEQIHVLEK |
| | | (SEQ ID NO 1484) |
| | | TDYDNFLMAHLINEK ox |
| | | (SEQ ID NO 1485) |
| gi\|6754654 | Mannose binding | AIEEKLANMEAEIR |
| | lectin (A) | (SEQ ID NO 1486) |
| | | AIEEKLANMEAEIR ox |
| | | (SEQ ID NO 1487) |
| | | AIQEVATGIAFLGITDEATEGQFMYVTGGR ox |
| | | (SEQ ID NO 1488) |
| | | GEPGQGLRGLQGPPGK |
| | | (SEQ ID NO 1489) |
| | | LANMEAEIR ox |
| | | (SEQ ID NO 1490) |
| | | LFVTNHEKMPFSK ox |
| | | (SEQ ID NO 1491) |
| | | LQLTNKLHAFSMGK ox |
| | | (SEQ ID NO 1492) |
| | | SLCTELQGTVAIPR cam |
| | | (SEQ ID NO 1493) |
| | | SLCTELQGTVAIPRNAEENK cam |
| | | (SEQ ID NO 1494) |
| | | VKSLCTELQGTVAIPR cam |
| | | (SEQ ID NO 1495) |
| gi\|33018 | Mannose binding | AEFDTSEIDSEIAALR |
| | protein C | (SEQ ID NO 1496) |
| | | AEFDTSEIDSEIAALRSELR |
| | | (SEQ ID NO 1497) |
| | | ALCSEFQGSVATPR cam |
| | | (SEQ ID NO 1498) |
| | | ALRNWVLFSLSEK |
| | | (SEQ ID NO 1499) |
| | | DIAYLGITDVR |
| | | (SEQ ID NO 1500) |
| | | DIAYLGITDVRVEGSFEDLTGNR |
| | | (SEQ ID NO 1501) |
| | | NWVLFSLSEK |
| | | (SEQ ID NO 1502) |
| | | VAKDIAYLGITDVR |
| | | (SEQ ID NO 1503) |
| | | VEGSFEDLTGNR |
| | | (SEQ ID NO 1504) |
| | | VEGSFEDLTGNRVR |
| | | (SEQ ID NO 1505) |
| | | VKALCSEFQGSVATPR cam |
| | | (SEQ ID NO 1506) |
| | | WNDVPCSDSFLAICEFSD cam cam |
| | | (SEQ ID NO 1507) |
| | | YTNWNDGEPNNTGDGEDCVVILGNGK cam |
| | | (SEQ ID NO 1508) |
| gi\|2118830 | MHC class I | AKGNEQSFHVSLR |
| | histocompatibility | (SEQ ID NO 1509) |
| | antigen H-2 Q10 | APWMEQEGPEYWER |
| | alpha chain | (SEQ ID NO 1510) |
| | | APWMEQEGPEYWER ox |
| | | (SEQ ID NO 1511) |
| | | APWMEQEGPEYWERETQR |
| | | (SEQ ID NO 1512) |
| | | APWMEQEGPEYWERETQR ox |
| | | (SEQ ID NO 1513) |
| | | AYLEAECVEWLLR cam |
| | | (SEQ ID NO 1514) |
| | | FDSDAETPRMEPR |
| | | (SEQ ID NO 1515) |
| | | FDSDAETPRMEPR ox |
| | | (SEQ ID NO 1516) |
| | | FIIVGYVDDTQFVR |
| | | (SEQ ID NO 1517) |
| | | FIIVGYVDDTQFVRFDSDAETPR |
| | | (SEQ ID NO 1518) |
| | | GNEQSFHVSLR |
| | | (SEQ ID NO 1519) |
| | | GYLQYAYDGR |
| | | (SEQ ID NO 1520) |
| | | GYLQYAYDGRDYIALNEDLK |
| | | (SEQ ID NO 1521) |
| | | KWEQAGAAEYYR |
| | | (SEQ ID NO 1522) |
| | | TDPPKTHVTHHPGSEGDVTLR |
| | | (SEQ ID NO 1523) |
| | | THVTHHPGSEGDVTLR |
| | | (SEQ ID NO 1524) |
| | | TWTAADVAAIITR |
| | | (SEQ ID NO 1525) |
| | | WASVVVPLGK |
| | | (SEQ ID NO 1526) |
| | | WEQAGAAEYYR |
| | | (SEQ ID NO 1527) |
| | | YFETSVSRPGLGEPR |
| | | (SEQ ID NO 1528) |
| | | YLELGKETLLR |
| | | (SEQ ID NO 1529) |
| gi\|387437 | MHC factor B | AEGIPEFYDYDVALVK |
| | | (SEQ ID NO 1530) |
| | | ALFVSEQGK |
| | | (SEQ ID NO 1531) |
| | | ALLDIGRDPK |
| | | (SEQ ID NO 1532) |
| | | ALRLPQTATCK cam |
| | | (SEQ ID NO 1533) |
| | | CLTNLIEK cam |
| | | (SEQ ID NO 1534) |
| | | DNEHHVFK |
| | | (SEQ ID NO 1535) |
| | | FIQVGVISWGVVDVCR cam |
| | | (SEQ ID NO 1536) |
| | | FLCTGGVDPYADPNTCK cam cam |
| | | (SEQ ID NO 1537) |
| | | GDSGGPLIVHKR |
| | | (SEQ ID NO 1538) |
| | | GNDYHKQPWQAK |
| | | (SEQ ID NO 1539) |
| | | HVIIIMTDGLHNMGGNPVTVIQDIR ox |
| | | (SEQ ID NO 1540) |
| | | HVIIIMTDGLHNMGGNPVTVIQDIR ox ox |
| | | (SEQ ID NO 1541) |
| | | ISVTRPLK |
| | | (SEQ ID NO 1542) |
| | | KAEGIPEFYDYDVALVK |
| | | (SEQ ID NO 1543) |
| | | KDNEHHVFK |
| | | (SEQ ID NO 1544) |
| | | LKDEDLGFL |
| | | (SEQ ID NO 1545) |
| | | LKYGQTLRPICLPCTEGTTR cam cam |
| | | (SEQ ID NO 1546) |
| | | LNQISYEDHKLK |
| | | (SEQ ID NO 1547) |
| | | RCLTNLIEK cam |
| | | (SEQ ID NO 1548) |
| | | RDLEIEEVLFHPK |
| | | (SEQ ID NO 1549) |
| | | SLSLCGMVWEHK cam |
| | | (SEQ ID NO 1550) |
| | | SLSLCGMVWEHK cam ox |
| | | (SEQ ID NO 1551) |
| | | SLSLCGMVWEHKK cam |
| | | (SEQ ID NO 1552) |
| | | SLSLCGMVWEHKK cam ox |
| | | (SEQ ID NO 1553) |
| | | VASYGVRPR |
| | | (SEQ ID NO 1554) |
| | | VKDASEVVTPR |
| | | (SEQ ID NO 1555) |
| | | VKDMEDLENVFYQMIDETK ox ox |
| | | (SEQ ID NO 1556) |
| | | VSVGGQRR |
| | | (SEQ ID NO 1557) |
| | | YGLLTYATVPK |
| | | (SEQ ID NO 1558) |
| | | YGQTLRPICLPCTEGTTR cam cam |
| | | (SEQ ID NO 1559) |
| gi\|55217 | Murine valosin- | EAVCIVLSDDTCSDEKIR cam cam |
| | containing protein | (SEQ ID NO 1560) |
| | | ELQELVQYPVEHPDKFLK |
| | | (SEQ ID NO 1561) |
| | | EVDIGIPDATGRLEILQIHTK |
| | | (SEQ ID NO 1562) |
| | | GILLYGPPGTGK |
| | | (SEQ ID NO 1563) |
| | | GVLFYGPPGCGK cam |
| | | (SEQ ID NO 1564) |
| | | IVSQLLTLMDGLK |
| | | (SEQ ID NO 1565) |
| | | IVSQLLTLMDGLKQR |
| | | (SEQ ID NO 1566) |
| | | IVSQLLTLMDGLKQR ox |
| | | (SEQ ID NO 1567) |
| | | KYEMFAQTLQQSR ox |
| | | (SEQ ID NO 1568) |
| | | MTNGFSGADLTEICQR ox cam |
| | | (SEQ ID NO 1569) |
| | | QAAPCVLFFDELDSIAK cam |
| | | (SEQ ID NO 1570) |
| | | WALSQSNPSALR |
| | | (SEQ ID NO 1571) |
| gi\|6679182 | Orosomucoid 1 | AVTHVGMDESEIIFVDWK ox |
| | | (SEQ ID NO 1572) |
| | | AVTHVGMDESEIIFVDWKK |
| | | (SEQ ID NO 1573) |
| | | AVTHVGMDESEIIFVDWKK ox |
| | | (SEQ ID NO 1574) |
| | | HGAFMLAFDLKDEK |
| | | (SEQ ID NO 1575) |
| | | HGAFMLAFDLKDEK ox |
| | | (SEQ ID NO 1576) |
| | | RPDITPELR |
| | | (SEQ ID NO 1577) |
| | | RPDITPELREVFQK |
| | | (SEQ ID NO 1578) |
| | | WFFMGAAFR |
| | | (SEQ ID NO 1579) |
| | | WFFMGAAFR ox |
| | | (SEQ ID NO 1580) |
| | | YEGGVETFAHLIVLR |
| | | (SEQ ID NO 1581) |
| | | YEGGVETFAHLIVLRK |
| | | (SEQ ID NO 1582) |
| gi\|31982113 | Plasminogen [Mus | CEGETDFVCR cam cam |
| | musculus] | (SEQ ID NO 1583) |
| | | CQSWAAMFPHR cam |
| | | (SEQ ID NO 1584) |
| | | CQSWAAMFPHR cam ox |
| | | (SEQ ID NO 1585) |
| | | CQSWAAMFPHRHSK cam |
| | | (SEQ ID NO 1586) |
| | | CQSWAAMFPHRHSK cam ox |
| | | (SEQ ID NO 1587) |
| | | CTTPPPPPSPTYQCLK cam cam |
| | | (SEQ ID NO 1588) |
| | | FTGQHFCGGTLIAPEWVLTAAHCLEK cam cam |
| | | (SEQ ID NO 1589) |
| | | FVDWIEREMR |
| | | (SEQ ID NO 1590) |
| | | FVDWIEREMR ox |
| | | (SEQ ID NO 1591) |
| | | GENYRGTVSVTVSGK |
| | | (SEQ ID NO 1592) |
| | | GKTAVTAAGTPCQGWAAQEPHR cam |
| | | (SEQ ID NO 1593) |
| | | HNRTPENFPCK cam |
| | | (SEQ ID NO 1594) |
| | | HSIFTPQTNPR |
| | | (SEQ ID NO 1595) |
| | | HSKTPENFPDAGLEMNYCR cam |
| | | (SEQ ID NO 1596) |
| | | HSKTPENFPDAGLEMNYCR ox cam |
| | | (SEQ ID NO 1597) |
| | | KCQSWAAMFPHR cam |
| | | (SEQ ID NO 1598) |
| | | KCQSWAAMFPHR cam ox |
| | | (SEQ ID NO 1599) |
| | | LILEPNNRDIALLK |
| | | (SEQ ID NO 1600) |
| | | LKEAQLPVIENK |
| | | (SEQ ID NO 1601) |
| | | LSRPATITDK |
| | | (SEQ ID NO 1602) |
| | | LSRPATITDKVIPACLPSPNYMVADR cam |
| | | (SEQ ID NO 1603) |
| | | LSRPATITDKVIPACLPSPNYMVADR cam ox |
| | | (SEQ ID NO 1604) |
| | | MRDVILFEK |
| | | (SEQ ID NO 1605) |
| | | MRDVILFEK ox |
| | | (SEQ ID NO 1606) |
| | | NLEENYCR cam |
| | | (SEQ ID NO 1607) |
| | | NLEENYCRNPDGETAPWCYTTDSQLR cam cam |
| | | (SEQ ID NO 1608) |
| | | NPDGDKGPWCYTTDPSVR cam |
| | | (SEQ ID NO 1609) |
| | | NPDGDVNGPWCYTTNPR cam |
| | | (SEQ ID NO 1610) |
| | | NPDGDVNGPWCYTTNPRK cam |
| | | (SEQ ID NO 1611) |
| | | NPDGEPRPWCFTTDPTK cam |
| | | (SEQ ID NO 1612) |
| | | NPDGEPRPWCFTTDPTKR cam |
| | | (SEQ ID NO 1613) |
| | | NPDNDEQGPWCYTTDPDKR cam |
| | | (SEQ ID NO 1614) |
| | | NYCRNPDGDVNGPWCYTTNPR cam cam |
| | | (SEQ ID NO 1615) |
| | | QLAAGGVSDCLAK cam |
| | | (SEQ ID NO 1616) |
| | | QLAAGGVSDCLAKCEGETDFVCR cam cam cam |
| | | (SEQ ID NO 1617) |
| | | RVYLSECK cam |
| | | (SEQ ID NO 1618) |
| | | SFQYHSKEQQCVIMAENSK cam |
| | | (SEQ ID NO 1619) |
| | | TAVTAAGTPCQGWAAQEPHR cam |
| | | (SEQ ID NO 1620) |
| | | TGIGNGYRGTMSR ox |
| | | (SEQ ID NO 1621) |
| | | TICYITGWGETQGTFGAGR cam |
| | | (SEQ ID NO 1622) |
| | | TPENFPCKNLEENYCR cam cam |
| | | (SEQ ID NO 1623) |
| | | TPENFPDAGLEMNYCR cam |
| | | (SEQ ID NO 1624) |
| | | TPENFPDAGLEMNYCR ox cam |
| | | (SEQ ID NO 1625) |
| | | VCNRVEYLNNR cam |
| | | (SEQ ID NO 1626) |
| | | VILGAHEEYIR |
| | | (SEQ ID NO 1627) |
| | | VILGAHEEYIRGSDVQEISVAK |
| | | (SEQ ID NO 1628) |
| | | VIPACLPSPNYMVADR cam |
| | | (SEQ ID NO 1629) |
| | | VIPACLPSPNYMVADR cam ox |
| | | (SEQ ID NO 1630) |
| | | VSRFVDWIER |
| | | (SEQ ID NO 1631) |
| | | WEYCDIPR cam |
| | | /SEQ ID NO 1632) |
| | | WEYCNLKR cam |
| | | (SEQ ID NO 1633) |
| | | WGATFPHVPNYSPSTHPNEGLEENYCR cam |
| | | (SEQ ID NO 1634) |
| | | WSEQTPHRHNR |
| | | (SEQ ID NO 1635) |
| | | YDYCNIPECEEECMYCSGEKYEGK cam cam cam ox |
| | | cam |
| | | (SEQ ID NO 1636) |
| gi\|2144495 | PLMS plasmin | CEGETDFVCR cam cam |
| | | (SEQ ID NO 1637) |
| | | CQSWAAMFPHR cam |
| | | (SEQ ID NO 1638) |
| | | CQSWAAMFPHR cam ox |
| | | (SEQ ID NO 1639) |
| | | CTTPPPPPSPTYQCLK cam cam |
| | | (SEQ ID NO 1640) |
| | | EQQCVIMAENSK cam ox |
| | | (SEQ ID NO 1641) |
| | | FTGQHFCGGTLIAPEWVLTAAHCLEK cam cam |
| | | (SEQ ID NO 1642) |
| | | FVDWIEREMR ox |
| | | (SEQ ID NO 1643) |
| | | GENYRGTVSVTVSGK |
| | | (SEQ ID NO 1644) |
| | | GKTAVTAAGTPCQGWAAQEPHR cam |
| | | (SEQ ID NO 1645) |
| | | HSIFTPQTNPR |
| | | (SEQ ID NO 1646) |
| | | KCQSWAAMFPHR cam |
| | | (SEQ ID NO 1647) |
| | | KCQSWAAMFPHR cam ox |
| | | (SEQ ID NO 1648) |
| | | LILEPNNRDIALLK |
| | | (SEQ ID NO 1649) |
| | | LKEAQLPVIENK |
| | | (SEQ ID NO 1650) |
| | | LSRPATITDK |
| | | (SEQ ID NO 1651) |
| | | LYDYCDIPLCASASSFECGKPQVEPKK cam cam |
| | | cam (SEQ ID NO 1652) |
| | | MRDVILFEK |
| | | (SEQ ID NO 1653) |
| | | MRDVILFEK ox |
| | | (SEQ ID NO 1654) |
| | | NLEENYCR cam |
| | | (SEQ ID NO 1655) |
| | | NPDGDKGPWCYTTDPSVR cam |
| | | (SEQ ID NO 1656) |
| | | NPDGDVNGPWCYTTNPR cam |
| | | (SEQ ID NO 1657) |
| | | NPDGETAPWCYTTDSQLR cam |
| | | (SEQ ID NO 1658) |
| | | NPDNDEQGPWCYTTDPDKR cam |
| | | (SEQ ID NO 1659) |
| | | NYCRNPDGDVNGPWCYTTNPR cam cam |
| | | (SEQ ID NO 1660) |
| | | QLAAGGVSDCLAKCEGETDFVCR cam cam cam |
| | | (SEQ ID NO 1661) |
| | | TAVTAAGTPCQGWAAQEPHR cam |
| | | (SEQ ID NO 1662) |
| | | TICYITGWGETQGTFGAGR cam |
| | | (SEQ ID NO 1663) |
| | | TPENFPDAGLEMNYCR cam |
| | | (SEQ ID NO 1664) |
| | | TPENFPDAGLEMNYCR ox cam |
| | | (SEQ ID NO 1665) |
| | | VCNRVEYLNNR cam |
| | | (SEQ ID NO 1666) |
| | | VILGAHEEYIR |
| | | (SEQ ID NO 1667) |
| | | VILGAHEEYIRGLDVQEISVAK |
| | | (SEQ ID NO 1668) |
| | | VIPACLPSPNYMVADR cam |
| | | (SEQ ID NO 1669) |
| | | VIPACLPSPNYMVADR cam ox |
| | | (SEQ ID NO 1670) |
| | | VSRFVDWIER |
| | | (SEQ ID NO 1671) |
| | | WEYCDIPR cam |
| | | (SEQ ID NO 1672) |
| | | WEYCNLKR cam |
| | | (SEQ ID NO 1673) |
| | | WSEQTPHRHNR |
| | | (SEQ ID NO 1674) |
| gi\|6680608 | Pregnancy zone | AAPLSLCALTAVDQSVLLLKPEAK cam |
| | protein | (SEQ ID NO 1675) |
| | | AESPVFVQTDKPIYKPGQIVKFR |
| | | (SEQ ID NO 1676) |
| | | AINYLISGYQR |
| | | (SEQ ID NO 1677) |
| | | ALLAYAFALAGNK |
| | | (SEQ ID NO 1678) |
| | | ALLAYAFALAGNKAK |
| | | (SEQ ID NO 1679) |
| | | AMGVPMMGLDYSDEINQVVEVR ox ox |
| | | (SEQ ID NO 1680) |
| | | EEGTGIELTGIGSCEIANALSKLK cam |
| | | (SEQ ID NO 1681) |
| | | HSLGDNDAHSIFQSVGINIFTNSK |
| | | (SEQ ID NO 1682) |
| | | HSLGDNDAHSIFQSVGINIFTNSKIHKPR |
| | | (SEQ ID NO 1683) |
| | | LSPQSIYNLLPGK |
| | | (SEQ ID NO 1684) |
| | | SKAINYLISGYQR |
| | | (SEQ ID NO 1685) |
| | | SVIVEPEGIEK |
| | | (SEQ ID NO 1686) |
| | | VKALSFYQPR |
| | | (SEQ ID NO 1687) |
| | | VNTNYRPGLPFSGQVLLVDEK |
| | | (SEQ ID NO 1688) |
| gi\|53787 | Properdin (AA 5- | CGGHCPGEAQQSQACDTQK cam cam cam |
| | 441) | (SEQ ID NO 1689) |
| | | DIRVEDCCLNAAYAFQEHDGGLCQACR cam cam |
| | | cam cam |
| | | (SEQ ID NO 1690) |
| | | HCYNIHNCIMK cam cam |
| | | (SEQ ID NO 1691) |
| | | HCYNIHNCIMK cam cam ox |
| | | (SEQ ID NO 1692) |
| | | HGGPFCAGDATR cam (SEQ ID NO 1693) |
| | | HGGPFCAGDATRNQMCNK cam ox cam |
| | | (SEQ ID NO 1694) |
| | | LQDIRHCYNIHNCIMK cam cam |
| | | (SEQ ID NO 1695) |
| | | LQDIRHCYNIHNCIMK cam cam ox |
| | | (SEQ ID NO 1696) |
| | | LRMSINCEGTPGQQSR cam |
| | | (SEQ ID NO 1697) |
| | | LRMSINCEGTPGQQSR ox cam |
| | | (SEQ ID NO 1698) |
| | | MSINCEGTPGQQSR cam |
| | | (SEQ ID NO 1699) |
| | | MSINCEGTPGQQSR ox cam |
| | | (SEQ ID NO 1700) |
| | | QRLCTPLLPK cam |
| | | (SEQ ID NO 1701) |
| | | QRVCDNPAPK cam |
| | | (SEQ ID NO 1702) |
| | | SCSAPAPSHQPPGKPCSGPAYEHK cam cam |
| | | (SEQ ID NO 1703) |
| | | SRSCSAPAPSHQPPGKPCSGPAYEHK cam cam |
| | | (SEQ ID NO 1704) |
| gi\|49868 | Put. beta-actin (aa | DLYANTVLSGGTTMYPGIADR |
| | 27-375) | (SEQ ID NO 1705) |
| | | DLYANTVLSGGTTMYPGIADR ox |
| | | (SEQ ID NO 1706) |
| | | DSYVGDEAQSK |
| | | (SEQ ID NO 1707) |
| | | DSYVGDEAQSKR |
| | | (SEQ ID NO 1708) |
| | | GYSFTTTAER |
| | | (SEQ ID NO 1709) |
| | | GYSFTTTAEREIVR |
| | | (SEQ ID NO 1710) |
| | | HQGVMVGMGQK ox ox |
| | | (SEQ ID NO 1711) |
| | | IWHHTFYNELR |
| | | (SEQ ID NO 1712) |
| | | KDLYANTVLSGGTTMYPGIADR ox |
| | | (SEQ ID NO 1713) |
| | | LCYVALDFEQEMATAASSSSLEK cam ox |
| | | (SEQ ID NO 1714) |
| | | LDLAGRDLTDYLMK |
| | | (SEQ ID NO 1715) |
| | | LDLAGRDLTDYLMK ox |
| | | (SEQ ID NO 1716) |
| | | QEYDESGPSIVHR |
| | | (SEQ ID NO 1717) |
| | | QEYDESGPSIVHRK |
| | | (SEQ ID NO 1718) |
| | | SYELPDGQVITIGNER |
| | | (SEQ ID NO 1719) |
| | | VAPEEHPVLLTEAPLNPK |
| | | (SEQ ID NO 1720) |
| gi\|34785996 | Pzp protein | AAPLSLCALTAVDQSVLLLKPEAK cam |
| | | (SEQ ID NO 1721) |
| | | AESPVFVQTDKPIYKPGQIVK |
| | | (SEQ ID NO 1722) |
| | | AESPVFVQTDKPIYKPGQIVKFR |
| | | (SEQ ID NO 1723) |
| | | AFAQAQSHIFIEK |
| | | (SEQ ID NO 1724) |
| | | AINYLISGYQR |
| | | (SEQ ID NO 1725) |
| | | ALLAYAFALAGNK |
| | | (SEQ ID NO 1726) |
| | | APSAEVEMTAYVLLAYLTSESSRPTR ox |
| | | (SEQ ID NO 1727) |
| | | ATVLNYMSHCIQIR ox cam |
| | | (SEQ ID NO 1728) |
| | | DAVKEEDSLHWQRPGDVQK |
| | | (SEQ ID NO 1729) |
| | | DLTFYYLIK |
| | | (SEQ ID NO 1730) |
| | | EEGTGIELTGIGSCEIANALSKLK cam |
| | | (SEQ ID NO 1731) |
| | | ENGCFQQSGYLLNNAMK cam |
| | | (SEQ ID NO 1732) |
| | | ENGCFQQSGYLLNNAMK cam ox |
| | | (SEQ ID NO 1733) |
| | | GSGSGCVYLQTSLK cam |
| | | (SEQ ID NO 1734) |
| | | GSIFNLGSHVLSLEQGNMK |
| | | (SEQ ID NO 1735) |
| | | GSIFNLGSHVLSLEQGNMK ox |
| | | (SEQ ID NO 1736) |
| | | HSLGDNDAHSIFQSVGINIFTNSK |
| | | (SEQ ID NO 1737) |
| | | IHYLLNEDIMKNEK ox |
| | | (SEQ ID NO 1738) |
| | | KIEHSFEVK |
| | | (SEQ ID NO 1739) |
| | | KLQDQPNIQR |
| | | (SEQ ID NO 1740) |
| | | LPDLPGNYVTK |
| | | (SEQ ID NO 1741) |
| | | LSPQSIYNLLPGK |
| | | (SEQ ID NO 1742) |
| | | LTEVPALVHKDTVVK |
| | | (SEQ ID NO 1743) |
| | | NEKDLTFYYLIK |
| | | (SEQ ID NO 1744) |
| | | SKAINYLISGYQR |
| | | (SEQ ID NO 1745) |
| | | SQKEVLVTIESSGTFSK |
| | | (SEQ ID NO 1746) |
| | | TEVNTNHVLIYIEK |
| | | (SEQ ID NO 1747) |
| | | THITNAFNWLSMK ox |
| | | (SEQ ID NO 1748) |
| | | TVQGAFFGVPVYK |
| | | (SEQ ID NO 1749) |
| | | VKALSFYQPR |
| | | (SEQ ID NO 1750) |
| | | VNTNYRPGLPFSGQVLLVDEK |
| | | (SEQ ID NO 1751) |
| | | YNILPVADGK |
| | | (SEQ ID NO 1752) |
| gi\|33859612 | Retinol binding | DPNGLSPETR |
| | protein 4 | (SEQ ID NO 1753) |
| | | DPNGLSPETRR |
| | | (SEQ ID NO 1754) |
| | | FSGLWYAIAK |
| | | (SEQ ID NO 1755) |
| | | FSGLWYAIAKK |
| | | (SEQ ID NO 1756) |
| | | LLSNWEVCADMVGTFTDTEDPAKFK cam ox |
| | | (SEQ ID NO 1757) |
| | | LQNLDGTCADSYSFVFSR cam |
| | | (SEQ ID NO 1758) |
| | | LQNLDGTCADSYSFVFSRDPNGLSPETR cam |
| | | (SEQ ID NO 1759) |
| | | MKYWGVASFLQR |
| | | (SEQ ID NO 1760) |
| | | MKYWGVASFLQR ox |
| | | (SEQ ID NO 1761) |
| | | QEELCLER cam |
| | | (SEQ ID NO 1762) |
| | | QRQEELCLER cam |
| | | (SEQ ID NO 1763) |
| | | QYRWIEHNGYCQSRPSR cam |
| | | (SEQ ID NO 1764) |
| | | WIEHNGYCQSRPSR cam |
| | | (SEQ ID NO 1765) |
| | | YWGVASFLQR |
| | | (SEQ ID NO 1766) |
| gi\|6678083 | Serine (or cysteine) | AVLTMDETGTEAAAATVLLAVPYSMPPIVR |
| | proteinase inhibitor, | (SEQ ID NO 1767) |
| | clade A, member 1a | AVLTMDETGTEAAAATVLLAVPYSMPPIVR ox |
| | | (SEQ ID NO 1768) |
| | | AVLTMDETGTEAAAATVLLAVPYSMPPIVR ox ox |
| | | (SEQ ID NO 1769) |
| | | DQSPASHEIATNLGDFAISLYR |
| | | (SEQ ID NO 1770) |
| | | FDHPFLFIIFEEHTQSPLFVGK |
| | | (SEQ ID NO 1771) |
| | | FLEEAKNHYQAEVFSVNFAESEEAK |
| | | (SEQ ID NO 1772) |
| | | IFNNGADLSGITEENAPLK |
| | | (SEQ ID NO 1773) |
| | | IFNNGADLSGITEENAPLKLSQAVHK |
| | | (SEQ ID NO 1774) |
| | | KLDQDTVFALANYILFK |
| | | (SEQ ID NO 1775) |
| | | KPFDPENTEEAEFHVDESTTVK |
| | | (SEQ ID NO 1776) |
| | | LAQIHFPRLSISGEYNLK |
| | | (SEQ ID NO 1777) |
| | | LDQDTVFALANYILFK |
| | | (SEQ ID NO 1778) |
| | | LSISGEYNLK |
| | | (SEQ ID NO 1779) |
| | | MQHLEQTLSKELISK |
| | | (SEQ ID NO 1780) |
| | | NHYQAEVFSVNFAESEEAK |
| | | (SEQ ID NO 1781) |
| | | NHYQAEVFSVNFAESEEAKK |
| | | (SEQ ID NO 1782) |
| | | RLAQIHFPR |
| | | (SEQ ID NO 1783) |
| | | SFQHLLQTLNRPDSELQLSTGNGLFVNNDLK |
| | | (SEQ ID NO 1784) |
| | | SFQHLLQTLNRPDSELQLSTGNGLFVNNDLKLVEK |
| | | (SEQ ID NO 1785) |
| | | TLMSPLGITR ox |
| | | (SEQ ID NO 1786) |
| | | VINDFVEKGTQGK |
| | | (SEQ ID NO 1787) |
| | | WKKPFDPENTEEAEFHVDESTTVK |
| | | (SEQ ID NO 1788) |
| gi\|15029662 | Serine (or cysteine) | DQSPASHEIATNLGDFAISLYR |
| | proteinase inhibitor, | (SEQ ID NO 1789) |
| | clade A, member la | FDHPFLFIIFEEHTQSPIFVGK |
| | | (SEQ ID NO 1790) |
| | | IFNNGADLSGITEENAPLK |
| | | (SEQ ID NO 1791) |
| | | IFNNGADLSGITEENAPLKLSQAVHK |
| | | (SEQ ID NO 1792) |
| | | KLDQDTVFALANYILFK |
| | | (SEQ ID NO 1793) |
| | | KPFDPENTEEAEFHVDESTTVK |
| | | (SEQ ID NO 1794) |
| | | LDQDTVFALANYILFK |
| | | (SEQ ID NO 1795) |
| | | LSISGEYNLK |
| | | (SEQ ID NO 1796) |
| | | LSQAVHKAVLTIDETGTEAAAVTVLQMVPMSMPPILR |
| | | ox ox ox |
| | | (SEQ ID NO 1797) |
| | | MQHLEQTLSK |
| | | (SEQ ID NO 1798) |
| | | NHYQAEVFSVNFAESEEAK |
| | | (SEQ ID NO 1799) |
| | | NHYQAEVFSVNFAESEEAKK |
| | | (SEQ ID NO 1800) |
| | | RLAQIHFPR |
| | | (SEQ ID NO 1801) |
| | | TLMSPLGITR |
| | | (SEQ ID NO 1802) |
| | | TLMSPLGITR ox |
| | | (SEQ ID NO 1803) |
| | | VINDFVEKGTQGK |
| | | (SEQ ID NO 1804) |
| | | WKKPFDPENTEEAEFHVDESTTVK |
| | | (SEQ ID NO 1805) |
| gi\|6678085 | Serine (or cysteine) | DQSPASHEIATNLGDFALR |
| | proteinase inhibitor, | (SEQ ID NO 1806) |
| | clade A, member 1d | ELISQFLLNRR |
| | | (SEQ ID NO 1807) |
| | | FDHPFLFIIFEEHTQSPIFVGK |
| | | (SEQ ID NO 1808) |
| | | FLEEAKNHYQAEVFSVNFAESEEAK |
| | | (SEQ ID NO 1809) |
| | | IFNNGADLSGITEENAPLK |
| | | (SEQ ID NO 1810) |
| | | IFNNGADLSGITEENAPLKLSK |
| | | (SEQ ID NO 1811) |
| | | KLDQDTVFALANYILFK |
| | | (SEQ ID NO 1812) |
| | | KVINDFVEK |
| | | (SEQ ID NO 1813) |
| | | LDQDTVFALANYILFK |
| | | (SEQ ID NO 1814) |
| | | LSISGNYNLK |
| | | (SEQ ID NO 1815) |
| | | MQHLEQTLNKELISQFLLNR |
| | | (SEQ ID NO 1816) |
| | | NHYQAEVFSVNFAESEEAK |
| | | (SEQ ID NO 1817) |
| | | NHYQAEVFSVNFAESEEAKK |
| | | (SEQ ID NO 1818) |
| | | QPFDPENTEEAEFHVDESTTVK |
| | | (SEQ ID NO 1819) |
| | | RSDAQIHIPR |
| | | (SEQ ID NO 1820) |
| | | SDAQIHIPR |
| | | (SEQ ID NO 1821) |
| | | TLMSPLGITR |
| | | (SEQ ID NO 1822) |
| | | TLMSPLGITR ox |
| | | (SEQ ID NO 1823) |
| | | TLMSPLGITRIFNNGADLSGITEENAPLK ox |
| | | (SEQ ID NO 1824) |
| | | VINDFVEKGTQGK |
| | | (SEQ ID NO 1825) |
| | | WKQPFDPENTEEAEFHVDESTTVK |
| | | (SEQ ID NO 1826) |
| gi\|6678087 | Serine (or cysteine) | DQSPASHEIATNLGDFAISLYR |
| | proteinase inhibitor, | (SEQ ID NO 1827) |
| | clade A, member 1e | FLEEAKNHYQAEVFSVNFAESEEAK |
| | | (SEQ ID NO 1828) |
| | | IFNSGADLSGITEENAPLK |
| | | (SEQ ID NO 1829) |
| | | IFNSGADLSGITEENAPLKLSQAVHK |
| | | (SEQ ID NO 1830) |
| | | KLEQDTVFVLANYILFK |
| | | (SEQ ID NO 1831) |
| | | KPFDPENTK |
| | | (SEQ ID NO 1832) |
| | | KVINDFVEK |
| | | (SEQ ID NO 1833) |
| | | LAQIHIPRLSISGNYNLETLMSPLGITR |
| | | (SEQ ID NO 1834) |
| | | LAQIHIPRLSISGNYNLETLMSPLGITR ox |
| | | (SEQ ID NO 1835) |
| | | LEQDTVFVLANYILFK |
| | | (SEQ ID NO 1836) |
| | | LSISGNYNLETLMSPLGITR |
| | | (SEQ ID NO 1837) |
| | | LSISGNYNLETLMSPLGITR ox |
| | | (SEQ ID NO 1838) |
| | | MQHLEQTLNKELISK |
| | | (SEQ ID NO 1839) |
| | | MQHLEQTLNKELISK ox |
| | | (SEQ ID NO 1840) |
| | | NHYQAEVFSVNFAESEEAKK |
| | | (SEQ ID NO 1841) |
| | | QAEFHVDESTTVK |
| | | (SEQ ID NO 1842) |
| | | RLAQIHIPR |
| | | (SEQ ID NO 1843) |
| | | VINDFVEKGTQGK |
| | | (SEQ ID NO 1844) |
| | | WKKPFDPENTK |
| | | (SEQ ID NO 1845) |
| gi\|18044689 | Serine (or cysteine) | ALYQTEAFTADFQQPTEAK |
| | proteinase inhibitor, | (SEQ ID NO 1846) |
| | clade A, member 3K | AVLDVAETGTEAAAATGVIGGIR |
| | | (SEQ ID NO 1847) |
| | | AVLDVAETGTEAAAATGVIGGIRK |
| | | (SEQ ID NO 1848) |
| | | DLQILAEFHEK |
| | | (SEQ ID NO 1849) |
| | | FSIASNYR |
| | | (SEQ ID NO 1850) |
| | | HFRDEELSCSVLELK cam |
| | | (SEQ ID NO 1851) |
| | | ISFDPQDTFESEFYLDEKR |
| | | (SEQ ID NO 1852) |
| | | KTLFPSQIEELNLPK |
| | | (SEQ ID NO 1853 |
| | | LALKNPDTNIVFSPLSISAALALVSLGAK |
| | | (SEQ ID NO 1854) |
| | | MQQVEASLQPETLR ox |
| | | (SEQ ID NO 1855) |
| | | MQQVEASLQPETLRK ox |
| | | (SEQ ID NO 1856) |
| | | TLFPSQIEELNLPK |
| | | (SEQ ID NO 1857) |
| | | TLMVLVNYIYFK ox |
| | | (SEQ ID NO 1858) |
| gi\|18252782 | Serine (or cysteine) | ANRPFLVLIR |
| | proteinase inhibitor, | (SEQ ID NO 1859) |
| | clade C | ANRPFLVLIREVALNTIIFMGR ox |
| | (antithrombin), | (SEQ ID NO 1860) |
| | member 1 | ATEEDGSEQKVPEATNR |
| | | (SEQ ID NO 1861) |
| | | DIPVNPLCIYR cam |
| | | (SEQ ID NO 1862) |
| | | DIPVNPLCIYRSPGK cam |
| | | (SEQ ID NO 1863) |
| | | ENPEQSRVTINNWVANK |
| | | (SEQ ID NO 1864) |
| | | EQLQDMGLIDLFSPEK ox |
| | | (SEQ ID NO 1865) |
| | | EVALNTIIFMGR |
| | | (SEQ ID NO 1866) |
| | | EVALNTIIFMGR ox |
| | | (SEQ ID NO 1867) |
| | | FATNFYQHLADSK |
| | | (SEQ ID NO 1868) |
| | | FRTEDGFSLK |
| | | (SEQ ID NO 1869) |
| | | IKDVIPQGAINELTALVLVNTIYFK |
| | | (SEQ ID NO 1870) |
| | | LQPLDFKENPEQSR |
| | | (SEQ ID NO 1871) |
| | | NDNDNIFLSPLSISTAFAMTK ox |
| | | (SEQ ID NO 1872) |
| | | QLMEVFKFDTISEK |
| | | (SEQ ID NO 1873) |
| | | QLMEVFKFDTISEK ox |
| | | (SEQ ID NO 1874) |
| | | SKFSPENTR |
| | | (SEQ ID NO 1875) |
| | | SLNPNRVTFK |
| | | (SEQ ID NO 1876) |
| | | SQLPGIVAGGRDDLYVSDAFHK |
| | | (SEQ ID NO 1877) |
| | | SSDLVSANRLFGDK |
| | | (SEQ ID NO 1878) |
| | | TSDQIHFFFAK |
| | | (SEQ ID NO 1879) |
| | | VAEGTQVLELPFKGDDITMVLILPKPEK |
| | | (SEQ ID NO 1880) |
| | | VAEGTQVLELPFKGDDITMVLILPKPEK ox |
| | | (SEQ ID NO 1881) |
| | | VDGQSCPVPMMYQEGK cam ox ox |
| | | (SEQ ID NO 1882) |
| | | VDGQSCPVPMMYQEGK ox cam |
| | | (SEQ ID NO 1883) |
| gi\|6679383 | Serine (or cysteine) | DFFHLDER |
| | proteinase inhibitor, | (SEQ ID NO 1884) |
| | clade F, member 2 | FDPSLTQKDFFHLDER |
| | | (SEQ ID NO 1885) |
| | | FTVSVDMMHAVSYPLR ox |
| | | (SEQ ID NO 1886) |
| | | FTVSVDMMHAVSYPLR ox ox |
| | | (SEQ ID NO 1887) |
| | | GFPIKDDFLEQSER |
| | | (SEQ ID NO 1888) |
| | | LAPRMEEDYPQFSSPK ox |
| | | (SEQ ID NO 1889) |
| | | LDNQDFGDHATLK |
| | | (SEQ ID NO 1890) |
| | | LDNQDFGDHATLKR |
| | | (SEQ ID NO 1891) |
| | | LFGAKPVK |
| | | (SEQ ID NO 1892) |
| | | LIGQNDKADFHGGK |
| | | (SEQ ID NO 1893) |
| | | LPLPALFK |
| | | (SEQ ID NO 1894) |
| | | LTGKQEEDLANINQWVK |
| | | (SEQ ID NO 1895) |
| | | NPNPSALPQLQEQR |
| | | (SEQ ID NO 1896) |
| | | NPNPSALPQLQEQRDSPDNR |
| | | (SEQ ID NO 1897) |
| | | QEEDLANINQWVK |
| | | (SEQ ID NO 1898) |
| | | SVPTAEETRR |
| | | (SEQ ID NO 1899) |
| | | WFLLEQPEIQVAHFPFK |
| | | (SEQ ID NO 1900) |
| gi\|l5929675 | Serpina1a protein | AVLTIDETGTEAAAVTVLLAVPYSMPPILR |
| | | (SEQ ID NO 1901) |
| | | AVLTIDETGTEAAAVTVLLAVPYSMPPILR ox |
| | | (SEQ ID NO 1902) |
| | | DQSPASHEIATNLGDFAISLYR |
| | | (SEQ ID NO 1903) |
| | | FDHPFLFIIFEEHTQSPLFVGK |
| | | (SEQ ID NO 1904) |
| | | FLEEAKNHYQAEVFSVNFAESEEAK |
| | | (SEQ ID NO 1905) |
| | | IFNNGADLSGITEENAPLK |
| | | (SEQ ID NO 1906) |
| | | IFNNGADLSGITEENAPLKLSQAVHK |
| | | (SEQ ID NO 1907) |
| | | KLDQDTVFALANYILFK |
| | | (SEQ ID NO 1908) |
| | | KPFDPENTEEAEFHVDESTTVK |
| | | (SEQ ID NO 1909) |
| | | KVINDFVEK |
| | | (SEQ ID NO 1910) |
| | | LDQDTVFALANYILFK |
| | | (SEQ ID NO 1911) |
| | | LSISGEYNLK |
| | | (SEQ ID NO 1912) |
| | | MQHLEQTLSK |
| | | (SEQ ID NO 1913) |
| | | MQHLEQTLSK ox |
| | | (SEQ ID NO 1914) |
| | | NHYQAEVFSVNFAESEEAK |
| | | (SEQ ID NO 1915) |
| | | NHYQAEVFSVNFAESEEAKK |
| | | (SEQ ID NO 1916) |
| | | RLAQIHFPR |
| | | (SEQ ID NO 1917) |
| | | SFQHLLQTLNRPDSELQLSTGNGLFVNNDLK |
| | | (SEQ ID NO 1918) |
| | | SFQHLLQTLNRPDSELQLSTGNGLFVNNDLKLVEK |
| | | (SEQ ID NO 1919) |
| | | TLMSPLGITR |
| | | (SEQ ID NO 1920) |
| | | TLMSPLGITR ox |
| | | (SEQ ID NO 1921) |
| | | VINDFVEKGTQGK |
| | | (SEQ ID NO 1922) |
| | | WKKPFDPENTEEAEFHVDESTTVK |
| | | (SEQ ID NO 1923) |
| gi\|14602605 | Serpina1a protein | AVLTIDETGTEAAAVTVLLAVPYSMPPILR |
| | | (SEQ ID NO 1924) |
| | | AVLTIDETGTEAAAVTVLLAVPYSMPPILR ox |
| | | (SEQ ID NO 1925) |
| | | DQSPASHEIATNLGDFAISLYR |
| | | (SEQ ID NO 1926) |
| | | FDHPFLFIIFEEHTQSPLFVGK |
| | | (SEQ ID NO 1927) |
| | | FLEEAKNHYQAEVFSVNFAESEEAK |
| | | (SEQ ID NO 1928) |
| | | FLLNRR |
| | | (SEQ ID NO 1929) |
| | | IFNNGADLSGITEENAPLK |
| | | (SEQ ID NO 1930) |
| | | IFNNGADLSGITEENAPLKLSQAVHK |
| | | (SEQ ID NO 1931) |
| | | KLDQDTVFALANYILFK |
| | | (SEQ ID NO 1932) |
| | | KPFDPENTEEAEFHVDESTTVK |
| | | (SEQ ID NO 1933) |
| | | KVINDFVEK |
| | | (SEQ ID NO 1934) |
| | | LAQIHFPR |
| | | (SEQ ID NO 1935) |
| | | LDQDTVFALANYILFK |
| | | (SEQ ID NO 1936) |
| | | LSISGEYNLK |
| | | (SEQ ID NO 1937) |
| | | MQHLEQTLSK ox |
| | | (SEQ ID NO 1938) |
| | | NHYQAEVFSVNFAESEEAK |
| | | (SEQ ID NO 1939) |
| | | NHYQAEVFSVNFAESEEAKK |
| | | (SEQ ID NO 1940) |
| | | RLAQIHFPR |
| | | (SEQ ID NO 1941) |
| | | SFQHLLQTLNRPDSELQLSTGNGLFVNNDLK |
| | | (SEQ ID NO 1942) |
| | | TLMSPLGITR |
| | | (SEQ ID NO 1943) |
| | | TLMSPLGITR ox |
| | | (SEQ ID NO 1944) |
| | | TLMSPLGITRIFNNGADLSGITEENAPLK |
| | | (SEQ ID NO 1945) |
| | | VINDFVEK |
| | | (SEQ ID NO 1946) |
| | | VINDFVEKGTQGK |
| | | (SEQ ID NO 1947) |
| | | WKKPFDPENTEEAEFHVDESTTVK |
| | | (SEQ ID NO 1948) |
| gi\|38174334 | Serum amyloid P- | APPSIVLGQEQDNYGGGFQR |
| | component | (SEQ ID NO 1949) |
| | | EKVGEYSLYIGQSK |
| | | (SEQ ID NO 1950) |
| | | EYTVKAPPSIVLGQEQDNYGGGFQR |
| | | (SEQ ID NO 1951) |
| | | GRDNELLIYK |
| | | (SEQ ID NO 1952) |
| | | SQSLFSYSVKGR |
| | | (SEQ ID NO 1953) |
| | | TYSDLSRSQSLFSYSVK |
| | | (SEQ ID NO 1954) |
| | | VFVFPRESETDHVK |
| | | (SEQ ID NO 1955) |
| | | VGEYSLYIGQSK |
| | | (SEQ ID NO 1956) |
| | | VGEYSLYIGQSKVTVR |
| | | (SEQ ID NO 1957) |
| gi\|20330802 | Transferrin | ADRDQYELLCLDNTR cam |
| | | (SEQ ID NO 1958) |
| | | AVLTSQETLFGGSDCTGNFCLFK cam cam |
| | | (SEQ ID NO 1959) |
| | | AVSSFFSGSCVPCADPVAFPK cam cam |
| | | (SEQ ID NO 1960) |
| | | CAPNNKEEYNGYTGAFR cam |
| | | (SEQ ID NO 1961) |
| | | CFVKLPEGTTPEK cam |
| | | (SEQ ID NO 1962) |
| | | CLKDGGGDVAFVK cam |
| | | (SEQ ID NO 1963) |
| | | CLVEKGDVAFVK cam |
| | | (SEQ ID NO 1964) |
| | | DFASCHLAQAPNHVVVSR cam |
| | | (SEQ ID NO 1965) |
| | | DFASCHLAQAPNHVVVSRK cam |
| | | (SEQ ID NO 1966) |
| | | DFQLFSSPLGK |
| | | (SEQ ID NO 1967) |
| | | DGGGDVAFVK |
| | | (SEQ ID NO 1968) |
| | | DLLFKDSAFGLLR |
| | | (SEQ ID NO 1969) |
| | | DLLFRDDTK |
| | | (SEQ ID NO 1970) |
| | | DQYELLCLDNTR cam |
| | | (SEQ ID NO 1971) |
| | | DSAFGLLR |
| | | (SEQ ID NO 1972) |
| | | DSAFGLLRVPPR |
| | | (SEQ ID NO 1973) |
| | | FDEFFSQGCAPGYEK cam |
| | | (SEQ ID NO 1974) |
| | | GTDFQLNQLEGKK |
| | | (SEQ ID NO 1975) |
| | | GYYAVAVVK |
| | | (SEQ ID NO 1976) |
| | | HQTVLDNTEGKNPAEWAK |
| | | (SEQ ID NO 1977) |
| | | IPSHAVVAR |
| | | (SEQ ID NO 1978) |
| | | KPVKDFASCHLAQAPNHVVVSR cam |
| | | (SEQ ID NO 1979) |
| | | KSCHTGLGR cam |
| | | (SEQ ID NO 1980) |
| | | KSCHTGVDR cam |
| | | (SEQ ID NO 1981) |
| | | LCQLCPGCGCSSTQPFFGYVGAFK cam cam cam |
| | | cam |
| | | (SEQ ID NO 1982) |
| | | LLEACTFHKH cam |
| | | (SEQ ID NO 1983) |
| | | LYLGHNYVTAIR |
| | | (SEQ ID NO 1984) |
| | | NLKQEDFELLCPDGTR cam |
| | | (SEQ ID NO 1985) |
| | | NQQEGVCPEGSIDNSPVK cam |
| | | (SEQ ID NO 1986) |
| | | NQQEGVCPEGSIDNSPVKWCALSHLER cam cam |
| | | (SEQ ID NO 1987) |
| | | SAGWVIPIGLLFCK cam |
| | | (SEQ ID NO 1988) |
| | | SCHTGLGR cam |
| | | (SEQ ID NO 1989) |
| | | SCHTGVDR cam |
| | | (SEQ ID NO 1990) |
| | | SKDFQLFSSPLGK |
| | | (SEQ ID NO 1991) |
| | | TAGWNIPMGMLYNR ox |
| | | (SEQ ID NO 1992) |
| | | TAGWNIPMGMLYNR ox ox |
| | | (SEQ ID NO 1993) |
| | | TSYPDCIK cam |
| | | (SEQ ID NO 1994) |
| | | TVLPPDGPR |
| | | (SEQ ID NO 1995) |
| | | VAQEHFGK |
| | | (SEQ ID NO 1996) |
| | | VPPRMDYR ox |
| | | (SEQ ID NO 1997) |
| | | WCALSHLER cam |
| | | (SEQ ID NO 1998) |
| | | WCAVSEHENTK cam |
| | | (SEQ ID NO 1999) |
| | | YLGAEYMQSVGNMR |
| | | (SEQ ID NO 2000) |
| | | YLGAEYMQSVGNMR ox |
| | | (SEQ ID NO 2001) |
| | | YLGAEYMQSVGNMRK |
| | | (SEQ ID NO 2002) |
| | | YLGAEYMQSVGNMRK ox |
| | | (SEQ ID NO 2003) |
| | | YLGAEYMQSVGNMRK ox ox |
| | | (SEQ ID NO 2004) |
| gi\|19354093 | Transthyretin | FVEGVYRVELDTK |
| | | (SEQ ID NO 2005) |
| | | GSPAVDVAVKVFK |
| | | (SEQ ID NO 2006) |
| | | HYTIAALLSPYSYSTTAVVSNPQN |
| | | (SEQ ID NO 2007) |
| | | KTSEGSWEPFASGK |
| | | (SEQ ID NO 2008) |
| | | LFLLCLAGLVFVSEAGPAGAGESKCPLMVK cam |
| | | cam ox |
| | | (SEQ ID NO 2009) |
| | | TAESGELHGLTTDEK |
| | | (SEQ ID NO 2010) |
| | | TAESGELHGLTTDEKFVEGVYR |
| | | (SEQ ID NO 2011) |
| | | TLGISPFHEFADVVFTANDSGHR |
| | | (SEQ ID NO 2012) |
| | | TSEGSWEPFASGK |
| | | (SEQ ID NO 2013) |
| | | VELDTKSYWK |
| | | (SEQ ID NO 2014) |
| | | VLDAVRGSPAVDVAVK |
| | | (SEQ ID NO 2015) |
| gi\|111243 | Vitamin D-binding | CCESTSEDCMASELPEHTIK cam cam cam ox |
| | protein | (SEQ ID NO 2016) |
| | | DLCGQSTTQAMDQYTFELSR cam |
| | | (SEQ ID NO 2017) |
| | | DLCGQSTTQAMDQYTFELSR cam ox |
| | | (SEQ ID NO 2018) |
| | | DLCGQSTTQAMDQYTFELSRR cam |
| | | (SEQ ID NO 2019) |
| | | DLCGQSTTQAMDQYTFELSRR cam ox |
| | | (SEQ ID NO 2020) |
| | | ECCDTQDSVACFSTQSPLLKR cam cam cam |
| | | (SEQ ID NO 2021) |
| | | EVVSLTEECCAEGADPTCYDTR cam cam cam |
| | | (SEQ ID NO 2022) |
| | | FSSSTFEQVNQLVK |
| | | (SEQ ID NO 2023) |
| | | GFADQFLYEYSSNYGQAPLPLLVAYTK |
| | | (SEQ ID NO 2024) |
| | | GQEMCADYSENTFTEYK cam |
| | | (SEQ ID NO 2025) |
| | | GQEMCADYSENTFTEYKK ox cam |
| | | (SEQ ID NO 2026) |
| | | HLSLLTTMSNR |
| | | (SEQ ID NO 2027) |
| | | HLSLLTTMSNR ox |
| | | (SEQ ID NO 2028) |
| | | KFSSSTFEQVNQLVK |
| | | (SEQ ID NO 2029) |
| | | KLCMAALSHQPQEFPTYVEPTNDEICEAFR cam ox |
| | | cam |
| | | (SEQ ID NO 2030) |
| | | LAQKVPTANLENVLPLAEDFTEILSR |
| | | (SEQ ID NO 2031) |
| | | LPTGKDLCGQSTTQAMDQYTFELSR cam ox |
| | | (SEQ ID NO 2032) |
| | | LQMKHLSLLTTMSNR ox |
| | | (SEQ ID NO 2033) |
| | | NYLSMVGSCCTSANPTVCFVK cam cam cam |
| | | (SEQ ID NO 2034) |
| | | NYLSMVGSCCTSANPTVCFVK ox cam cam cam |
| | | (SEQ ID NO 2035) |
| | | QLTSFIEKGQEMCADYSENTFTEYK ox cam |
| | | (SEQ ID NO 2036) |
| | | RTQVPEVFLSK |
| | | (SEQ ID NO 2037) |
| | | SCESDAPFPVHPGTPECCTK cam cam cam |
| | | (SEQ ID NO 2038) |
| | | SCESDAPFPVHPGTPECCTKEGLER cam cam cam |
| | | (SEQ ID NO 2039) |
| | | SLSLILYSR |
| | | (SEQ ID NO 2040) |
| | | TLRECCDTQDSVACFSTQSPLLK cam cam cam |
| | | (SEQ ID NO 2041) |
| | | TQVPEVFLSK |
| | | (SEQ ID NO 2042) |
| | | VCSQYAAYGK cam |
| | | (SEQ ID NO 2043) |
| | | VCSQYAAYGKEK cam |
| | | (SEQ ID NO 2044) |
| | | VPTANLENVLPLAEDFTEILSR |
| | | (SEQ ID NO 2045) |
| gi\|1083568 | Zinc-alpha 2- | AREEIFLVTLK |
| | glycoprotein | (SEQ ID NO 2046) |
| | | AYLEEECPEMLKR cam |
| | | (SEQ ID NO 2047) |
| | | AYLEEECPEMLKR cam ox |
| | | (SEQ ID NO 2048) |
| | | CLAYGFYPQR cam |
| | | (SEQ ID NO 2049) |
| | | FQATAFLNDQAFFHYNSNSGK |
| | | (SEQ ID NO 2050) |
| | | GFSQSLSVQWDR |
| | | (SEQ ID NO 2051) |
| | | SHLDRIDPPTVTITSR |
| | | (SEQ ID NO 2052) |
| | | VIPGGNRIFK |
| | | (SEQ ID NO 2053) |
| | | WEAEKVYVQR |
| | | (SEQ ID NO 2054) |
| | | YAYDGEDFIEFNK |
| | | (SEQ ID NO 2055) |

Legenda
ox = methionin oxidation
cam = carbamidomethyl oxidation

### REFERENCES

[0149] (1) Zerbini, A.; Pilli, M.; Ferrari, C.; Missale, G. Dig. Liver Dis. 2006, 38(4), 221-5.
[0150] (2) Jemal, A.; Murray, T.; Ward, E.; Samuels, A.; Tiwari, R. C.; Ghafoor, A.; Feuer, E. J.; Thun, M. J. CA Cancer J. Clin. 2005, 55(1), 10-30.
[0151] (3) Chen, C. J.; Yu, M. W.; Liaw, Y. F. J. Gastroenterol. Hepatol. 1997, 12(9-10), S294-308.
[0152] (4) Santella, R. M.; Zhang, Y. J.; Young, T. L.; Lee, B. M.; Lu, X. Q. Adv. Exp. Med. Biol. 1991, 283,165-81.
[0153] (5) Chen, S. Y.; Wang, L. Y.; Lunn, R. M.; Tsai, W. Y.; Lee, P. H.; Lee, C. S.; Ahsan, H.; Zhang, Y. J.; Chen, C. J.; Santella, R. M. Int J Cancer 2002, 99(1), 14-21.
[0154] (6) Grizzi, F.; Franceschini, B.; Hamrick, C.; Frezza, E. E.; Cobos, E.; Chiriva-Internati, M. J. Transl. Med. 2007, 53
[0155] (7) Zhou, L.; Liu, J.; Luo, F. World J Gastroenterol 2006, 12(8), 1175-1181.
[0156] (8) Borlak, J.; Meier, T.; Halter, R.; Spanel, R.; Spanel-Borowski, K. Oncogene 2005, 24(11), 1809-1819.
[0157] (9) Sebastian, S.; Settleman, J.; Reshkin, S. J.; Azzariti, A.; Bellizzi, A.; Paradiso, A. Biochim. Biophys. Acta 2006, 1766(1), 120-139.
[0158] (10) Yano, S.; Kondo, K.; Yamaguchi, M.; Richmond, G.; Hutchison, M.; Wakeling, A.; Averbuch, S.; Wadsworth, P. Anticancer Res 2003, 23(5A), 3639-3650.
[0159] (11) Tonjes, R. R.; Lohler, J.; O'Sullivan, J. F.; Kay, G. F.; Schmidt, G. H.; Dalemans, W.; Pavirani, A.; Paul, D. Oncogene 1995, 10(4), 765-8.
[0160] (12) Shen, H; Cheng, G; Fan, H; Zhang, J; Zhang, X; Lu, H; Liu, C; Sun, F; Jin, H; Xu, X; Xu, G; Wang, S; Fang, C; Bao, H; Wang, Y; Wang, J; Zhong, H; Yu, Z; Liu, Y; Tang, Z; Yang, P. Proteomics, 2006, 6(2), 528-37.
[0161] (13) Cui, F; Wang, Y; Wang, J; Wei, K; Hu, J; Liu, F; Wang, H; Zhao, X; Zhang, X; Yang, X. Proteomics, 2006, 6(2), 498-504.
[0162] (14) Wisniewski, T.; Golabek, A. A.; Kida, E.; Wisniewski, K. E.; Frangione, B. Am J Pathol. 1995, 147(2), 238-244.
[0163] (15) Gerner, C.; Steinkellner, W.; Holzmann, K.; Gsur, A.; Grimm, R.; Ensinger, C.; Obrist, P.; Sauermann, G. Thromb Haemost. 2001, 85(3), 494-501.
[0164] (16) Vejda, S.; Posovszky, C.; Zelzer, S.; Peter, B.; Bayer, E.; Gelbmann, D.; Schulte-Hermann, R.; Gerner, C. Mol Cell Proteomics. 2002, 1(5), 387-393.
[0165] (17) Fan, B. L.; Zhu, W. L.; Zou, G. L.; Luo, G. S.; Xu, C. L.; Zhao, W. X. Ai. Zheng. 2004, 23(3), 249-253.
[0166] (18) Vassalli, J. D.; Sappino, A. P.; Belin, D. J Clin Invest 1991, 88 (4), 1067-1072.
[0167] (19) Sudhoff, T.; Schneider, W. Clin Investig. 1992, 70(8), 631-636.
[0168] (20) Brunner, G.; Preissner, K. T. Blood Coagul. Fibrinolysis 1994, 5(4), 625-639.
[0169] (21) Falleti, E.; Pirisi, M.; Fabris, C.; Bortolotti, N.; Soardo, G.; Toniutto, P.; Gonano, F.; Bartoli, E. Eur J Clin Chem. Clin Biochem. 1993, 31(7), 407-411.
[0170] (22) Perier, C.; Chamson, A.; Engler, R.; Frey, J. Clin Chem. 1983, 29 (1), 45-47.
[0171] (23) Chio, L. F.; Oon, C. J. Cancer 1979, 43(2), 596-604.
[0172] (24) Lichtor, T. Neurosci Lett. 1992, 138(2), 287-90.
[0173] (25) Tanne, J. H. BMJ. 1999, 319(7211), 662.
[0174] (26) Hough, C. D.; Sherman-Baust, C. A.; Pizer, E. S.; Montz, F. J.; Im, D. D.; Rosenshein, N. B.; Cho, K. R.; Riggins, G. J.; Morin, P. J. Cancer Res. 2000, 60(22), 6281-7.
[0175] (27) Niemi, M.; Kervinen, K.; Kiviniemi, H.; Lukkarinen, O.; Kyllonen, A. P.; Apaja-Sarkkinen, M.; Savolainen, M. J.; Kairaluoma, M. I.; Kesaniemi, Y. A. J Epidemiol Community Health. 2000, 54(12), 938-9.
[0176] (28) Yokoyama, Y.; Kuramitsu, Y.; Takashima, M.; Iizuka, N.; Terai, S.; Oka, M.; Nakamura, K.; Okita, K.; Sakaida, I. Int J Oncol. 2006, 28(3), 625-631.
[0177] (29) Xu, N.; Hurtig, M.; Zhang, X. Y.; Ye, Q.; Nilsson-Ehle, P. Biochim. Biophys. Acta 2004, 1683(1-3), 33-37.
[0178] (30) Luo, G.; Zhang, X.; Nilsson-Ehle, P.; Xu, N. Lipids Health Dis 2004, 3 21.
[0179] (31) Richter, S.; Shih, D. Q.; Pearson, E. R.; Wolfrum, C.; Fajans, S. S.; Hattersley, A. T.; Stoffel, M. Diabetes 2003, 52(12), 2989-2995.
[0180] (32) Karlsson, H.; Leanderson, P.; Tagesson, C.; Lindahl, M. Proteomics. 2005, 5(5), 1431-1445.
[0181] (33) Ruiu, G.; Gambino, R.; Veglia, F.; Pagano, G.; Cassader, M. Clin Genet. 1997, 52(3), 167-172.
[0182] (34) Chiang, M. T.; Otomo, M. I.; Itoh, H.; Furukawa, Y.; Kimura, S.; Fujimoto, H. Lipids 1991, 26(1), 46-52.
[0183] (35) Averna, M.; Paravizzini, G.; Marino, G.; Lanteri, E.; Cavera, G.; Barbagallo, C. M.; Petralia, S.; Cavallaro, S.; Magro, G.; Grasso, S.; Notarbartolo, A.; Travali, S. Int J Clin Lab Res 1997, 27(3), 207-212.
[0184] (36) Okkels, H.; Rasmussen, T. E.; Sanghera, D. K.; Kamboh, M. I.; Kristensen, T. Eur J. Biochem. 1999, 259(1-2), 435-440.
[0185] (37) Petersen, C. M.; Jensen, P. H.; Bukh, A.; Sunde, L.; Lamm, L. U.; Ingerslev, J. Scand J Clin Lab Invest 1990, 50(5), 479-485.
[0186] (38) Teng, H.; Zhang, W. Y.; Zhu, F. Q. Chin Med J (Engl.) 1994, 107(12), 910-914.
[0187] (39) Bhattacharya, M.; Barlow, J. J. Int Adv. Surg. Oncol. 1979, 2155-176.
[0188] (40) Bierl, C.; Voetsch, B.; Jin, R. C.; Handy, D. E.; Loscalzo, J. J Biol. Chem. 2004, 279(26), 26839-26845.
[0189] (41) Giannattasio, A.; De Rosa, M.; Smeraglia, R.; Zarrilli, S.; Cimmino, A.; Di Rosario, B.; Ruggiero, R.; Colao, A.; Lombardi, G. J Endocrinol Invest 2002, 25(11), 983-986.
[0190] (42) Burk, R. F.; Early, D. S.; Hill, K. E.; Palmer, I. S.; Boeglin, M. E. Hepatology 1998, 27(3), 794-8.
[0191] (43) Reszka, E.; Gromadzinska, J.; Stanczyk, M.; Wasowicz, W. Biol Trace Elem. Res 2005, 104(2), 165-172.
[0192] (44) Chignard, N; Shang, S; Wang, H; Marrero, J; Bréchot, C; Hanash, S; Beretta L. Gastroenterology, 2006, 130(7), 2010-22.
[0193] (45) Lauer, G.; Sollberg, S.; Cole, M.; Flamme, I.; Sturzebecher, J.; Mann, K.; Krieg, T.; Eming, S. A. J Invest Dermatol. 2000, 115(1), 12-18.
[0194] (46) Bhat, V B; Choi, M H; Wishnok, J S; Tannenbaum, S R. J Proteome Res., 2005, 4(5), 1814-25.
[0195] (47) Andersson, C.; Gelin, J.; Iresjo, B. M.; Lundholm, K. J. Surg. Res 1993, 55(6), 607-614.
[0196] (48) Van Molle, W.; Libert, C.; Fiers, W.; Brouckaert, P. J Immunol 1997, 159(7), 3555-3564.
[0197] (49) Agrawal, R. S.; Karhu, K.; Laukkanen, J.; Kirkinen, P.; Yla-Herttuala, S.; Agrawal, Y. P. Gene Ther. 1999, 6(1), 146-148.
[0198] (50) De Masi, S.; Tosti, M. E.; Mele, A. Dig Liver Dis. 2005, 37(4), 260-8.

[0199] The characteristics of the invention being disclosed in the preceding description, the subsequent drawings and claims can be of importance both singularly and in arbitrary combination for the implementation of the invention in its different embodiments.

[0200] The foregoing description of preferred embodiments of the invention has been presented for the purposes of illustration and description. It is not intended to be exhaustive or to limit the invention to the precise form described, and many modifications and variations are possible in light of the teaching above. The embodiments were chosen and described in order to best explain the principles of the invention and its practical applications to thereby enable others skilled in the art to best utilize the invention in various embodiments and with various modifications as are suited to the particular use contemplated invention being thus described, it will be obvious that the same may be varied in many ways. Such variations are not to be regarded as a departure from the spirit and scope of the invention, and all such modifications as would be obvious to one skilled in the art are intended to be included within the scope of the following claims.

What is claimed is:

1. A biomarker selected from a first group consisting of
Amy 1, Apo Al, Carbx, Casp, AFP, ApoM, SAP, Fib-a, Fib-b, Fib-g, ApoE, A2MG, A2MG isoform, Serpin, Clusterin, MHC-fB, SAP isoform,
or from a second group consisting of
Gpx3, properidin, MUP1, HMW-K, Lifr-p, Orm 1, MBL-A, MBP-C,
wherein the biomarker is regulated by EGF overexpression in a subject.

2. Biomarker as claimed in claim 1 selected from a first group consisting of
Amy 1, Apo Al, Carbx, Casp, Fib-a, Fib-b, Fib-g, Clusterin, MHC-fB, SAP isoform or from a second group consisting of
HMW-K, Lifr-p, Orm 1, MBL-A, MBP-C.

3. Biomarker as claimed in claim 1 selected from a first group consisting of
AFP, ApoE, ApoM,
or from a second group consisting of
Gpx3, A2MG, A2MG isoform, SAP.

4. A composition for qualifying the EGFR kinase activity in a subject suffering from or being susceptible to cancer, in particular by an in vitro body fluid analysis, comprising an effective amount of at least one biomarker selected from the first group according to one of the claims 1-3 or an effective amount of at least one biomarker selected from the second group according to one of the claims 1-3.

5. Composition as claimed in claim 4 comprising an effective amount of at least one biomarker selected from the first group according to one of the claims 1-3 and an effective amount of at least one biomarker selected from the second group according to one of the claims 1-3.

6. Use of a composition as claimed in one of the claims 4-5 for the production of a diagnostic agent, in particular of a diagnostic standard for body fluid analysis.

7. Use as claimed in claim 6 for the production of a diagnostic agent for qualifying the EGFR kinase activity in a subject suffering from or being susceptible to cancer, in particular cancer of the liver, lung, breast, colon, prostate, bladder, head and neck, ovary or brain.

8. Use as claimed in one of the claims 6-7 for the production of a diagnostic agent for predicting or monitoring the response of a cancer patient to a method of treating cancer comprising administering an EGFR kinase modulator.

9. A kit for qualifying the EGFR kinase activity in a subject suffering from or being susceptible to cancer, in particular for predicting or monitoring the response of a cancer patient to a method of treating cancer comprising administering an EGFR kinase modulator, comprising
at least one standard (1) indicative of the body fluid level of a biomarker selected from the first group according to one of the claims 1-3 in normal individuals or individuals having cancer associated with increased EGFR kinase activity and/or at least one standard (2) indicative of the body fluid level of a biomarker selected from the second group according to one of the claims 1-3 in normal individuals or individuals having cancer associated with increased EGFR kinase activity, and instructions for the use of the kit.

10. The kit as claimed in claim 9, wherein the at least one standard (1) comprises an indicative amount of at least one biomarker selected from the first group according to one of the claims 1-3 and/or wherein the at least one standard (2) comprises an indicative amount of at least one biomarker selected from the second group according to one of the claims 1-3.

11. The kit as claimed in one of the claims 9-10, comprising a mixture of the at least one standard (1) and the at least one standard (2), in particular the composition according to claim 5.

12. The kit as claimed in one of the claims 9-11, further comprising a lysis buffer according to one of the claims 23-25 and/or a digesting buffer according to one of the claims 23-25.

13. The kit as claimed in one of the claims 9-12, further comprising at least one antibody specific for a biomarker selected from the first group according to one of the claims 1-3 and/or at least one antibody specific for a biomarker selected from the second group according to one of the claims 1-3, and reagents effective to detect said biomarker(s) in a serum sample.

14. The kit as claimed in claim 13, wherein the at least one antibody is polyclonal.

15. The kit as claimed in one of the claims 13-14 comprising at least one labelled secondary antibody specific for the at least one antibody of claim 9-10.

16. A method of qualifying the EGFR kinase activity in a subject, comprising determining in a body fluid sample of a subject suffering from or being susceptible to cancer at least one biomarker selected from the first group according to one of the claims 1-3 and/or at least one biomarker selected from the second group according to one of the claims 1-3,
wherein the body fluid level of the at least one biomarker of said first group being significantly higher and/or the body fluid level of the at least one biomarker of said second group being significantly lower than the level of said biomarker(s) in the body fluid of subjects without cancer associated with increased activity of EGFR is indicative of induced EGFR kinase activity in the subject.

17. Method as claimed in claim 16 for predicting the response of a cancer patient to a method of treating cancer comprising administering an EGFR kinase modulator, wherein the body fluid level of the at least one biomarker of said first group being significantly higher and/or the body fluid level of the at least one biomarker of said second group being significantly lower than the level of said biomarker(s) in the body fluid of subjects without cancer associated with increased activity of EGFR is indicative that the subject will respond therapeutically to a method of treating cancer comprising administering an EGFR kinase modulator.

18. Method as claimed in claim 16 for monitoring the therapeutically response of a cancer patient to a method of treating cancer comprising administering an EGFR kinase modulator, wherein the body fluid level of the at least one biomarker of said first group before and after the treatment and/or the body fluid level of the at least one biomarker of said second group before and after the treatment is determined, and a significant decrease of said body fluid level(s) of the at least one biomarker of said first group and/or a significant increase of said body fluid level(s) of the at least one biomarker of said second group after the treatment is indicative that the cancer patient therapeutically responds to the administration of the EGFR kinase modulator.

19. The method as claimed in one of the claims 16-18, wherein an immunoassay is performed, in particular by using the kit as claimed in one of the claims 9-15.

20. The method as claimed in claim 19, wherein at least one antibody specific for a biomarker selected from the first group according to claim 2 and/or at least one antibody specific for a biomarker selected from the second group according to claim 2, and reagents effective to detect said biomarker(s) in a serum sample is used for the immunoassay.

21. The method as claimed in one of the claims 16-18, wherein a peptide mass fingerprinting is performed, in particular by using the kit as claimed in one of the claims 9-12.

22. The method as claimed in claim 21, comprising the steps of
isolating a serum sample from a blood sample of a subject suffering from or being susceptible to cancer;
adding lysis buffer to the serum sample;
separating the proteins of the lysed serum sample by 2-DE gel electrophoresis;
excising from the gel at least one sample containing a protein of interest;
adding digesting buffer to the at least one excised sample;
determining the amount of the at least one protein of interest by analyzing the at least one digest mixture by mass spectrometry.

23. The method as claimed in claim 22, wherein
the subject is a human patient or non-human transgenic animal; and/or
the serum sample is isolated by centrifuging the blood sample; and/or
the 2-DE is performed by using two different pH gradients; and/or
the lysis buffer comprises (a) at least one buffer component, (b) at least one chaotrope, (c) at least one detergens, (d) at least one reducing agent (e) at least one carrier ampholyte, (f) at least one ribonuclease; and/or
the protein of interest is a biomarker selected from the first group according to one of the claims 1-3 or a biomarker selected from the second group according to one of the claims 1-3; and/or
the digesting buffer comprises a bicarbonate compound and a protease; and/or
wherein the mass spectrometry is selected from the group consisting of MALDI-TOF and ESI-TOF.

24. The method as claimed in one of the claims 22-23, wherein
the subject is suffering from or is susceptible to cancer in particular cancer of the liver, lung, breast, colon, prostate, bladder, head and neck, ovary or brain; and/or
the 2-DE is performed by using the pH gradients 3-10 and 4-7; and/or
the lysis buffer is an aqueous solution of (a) at least one buffer compound selected from the group consisting of Tris and HEPES, (b) at least one chaotrope selected from the group consisting of urea and thiourea, (c) at least one detergens selected from the group consisting of CHAPS and SDS, (d) at least one reducing agent selected from the group consisting of DTT and TCEP, (e) at least one carrier ampholyte selected from the group consisting of biolyte 5-7 and biolyte 3-10, (f) at least one ribonuclease selected from the group consisting of endonuclease and exonuclease; and/or
the protein of interest is a biomarker selected from the first group according to one of the claims 2-3 or a biomarker selected from the second group according to one of the claims 2-3; and/or
the digesting buffer is an aqueous solution of at least one bicarbonate compound selected from the group consisting of ammonium bicarbonate and sodium bicarbonate and of at least one serine protease, in particular selected from the group consisting of trypsin, chymotrypsin and elastase; and/or
the mass spectrometry is performed by MALDI-TOF; and/or
a tandem mass spectrometer is used; and/or
a matrix is used for the mass spectrometry selected from the group consisting of 3,5-dimethoxy-4-hydroxycinnamic acid, α-cyano-4-hydroxycinnamic acid and 2,5-dihydroxybenzoic acid.

25. The method as claimed in one of the claims 22-24, wherein
the subject is a transgenic mouse, in particular a mouse whose genome comprises a non natural IgEGF sequence; and/or
the lysis buffer is an aqueous solution of (a) Tris; (b) urea and thiourea, (c) CHAPS, (d) DTT, (e) biolyte 3-10, (f) endonuclease; and/or
the serum sample is calibrated or the serum samples are equilibrated to a predefined protein concentration by adding the lysis buffer; and/or
the protein of interest is a biomarker selected from the first group according to claim 3 or a biomarker selected from the second group according to claim 3; and/or
the digesting buffer is an aqueous solution of ammonium bicarbonate and trypsin; and/or
a MALDI-TOF/TOF spectrometry is performed; and/or
a matrix is used for the mass spectrometry selected from the group consisting of α-cyano-4-hydroxycinnamic acid.

26. The method as claimed in one of the claims 22-25, further comprising the steps of
determining the protein concentration of the serum sample, in particular by the Bradford method; and/or
freezing and thawing the serum sample before the lysis buffer is added; and/or
staining the gel after the 2-DE, in particular by using coomassie blue; and/or
destaining the exised sample; and/or
shrinking, in particular by adding acetonitrile, and drying of the excised sample before the digesting buffer is added; and/or
using a peptide calibration standard for the mass spectrometry.

27. A procedure to screen for and to identify drugs against cancer associated with an increased EGFR kinase activity comprising determining in a body fluid sample of a transgenic cancer mouse being treated with a compound to be tested, in particular of a mouse whose genome comprises a non natural IgEGF sequence, at least one biomarker selected from the first group according to one of the claims 1-3 and/or at least one biomarker selected from the second group according to one of the claims 1-3, wherein the body fluid level of the at least one biomarker of said first group being significantly lower and/or the body fluid level of the at least one biomarker of said second group being significantly higher than the level of said biomarker(s) in the body fluid of an untreated transgenic cancer mouse is indicative of the therapeutic effect of said compound as a EGFR kinase modulator.

28. The procedure as claimed in claim 27, wherein the method as claimed in claim 18, in particular according to one of the claims 19-26, is used.

The application's sequence listing, which the Patent Office published only in electronic form, follows.

SEQUENCE LISTING (2056 sequences)

SEQ ID NO: 1 - DNA, 30 bp, Mus musculus
  EGF2B-transgene (forward primer)
ctaggccaagggccttgggggctcttgcag

SEQ ID NO: 2 - DNA, 29 bp, Mus musculus
  EGF2B-transgene (reverse primer)
catgcgtatttgtccagagcttcgatgta

SEQ ID NO: 3 - protein, 10 aa, Artificial Sequence
  Description of Artificial Sequence: ACTB protein peptide 1
AGFAGDDAPR

SEQ ID NO: 4 - protein, 11 aa, Artificial Sequence
  Description of Artificial Sequence: ACTB protein peptide 2
AVFPSIVGRPR

SEQ ID NO: 5 - protein, 21 aa, Artificial Sequence
  Description of Artificial Sequence: ACTB protein
DLYANTVLSGGTTMYPGIADR

SEQ ID NO: 6 - protein, 12 aa, Artificial Sequence
  Description of Artificial Sequence: ACTB protein peptide 3
DSYVGDEAQSKR

SEQ ID NO: 7 - protein, 10 aa, Artificial Sequence
  Description of Artificial Sequence: ACTB protein peptide 4
GYSFTTTAER

SEQ ID NO: 8 - protein, 14 aa, Artificial Sequence
  Description of Artificial Sequence: ACTB protein peptide 5
GYSFTTTAEREIVR

SEQ ID NO: 9 - protein, 13 aa, Artificial Sequence
  Description of Artificial Sequence: ACTB protein peptide 6
  MOD_RES (12)..(13): Methionin oxidation
HQGVMVGMGQKMM

SEQ ID NO: 10 - protein, 24 aa, Artificial Sequence
  Description of Artificial Sequence: ACTB protein peptide 7
  MOD_RES (23)..(24): Methionin oxidation
HQGVMVGMGQKDSYVGDEAQSKMM

SEQ ID NO: 11 - protein, 8 aa, Artificial Sequence
  Description of Artificial Sequence: ACTB protein peptide 8
IIAPPERK

SEQ ID NO: 12 - protein, 9 aa, Artificial Sequence
  Description of Artificial Sequence: ACTB protein peptide 9
IKIIAPPER

SEQ ID NO: 13 - protein, 15 aa, Artificial Sequence
  Description of Artificial Sequence: ACTB protein peptide 10
ILTERGYSFTTTAER

SEQ ID NO: 14 - protein, 11 aa, Artificial Sequence
  Description of Artificial Sequence: ACTB protein peptide 11
IWHHTFYNELR

SEQ ID NO: 15 - protein, 23 aa, Artificial Sequence
  Description of Artificial Sequence: ACTB protein peptide 12
  MOD_RES (23)..(23): Methionin oxidation
KDLYANTVLSGGTTMYPGIADRM

SEQ ID NO: 16 - protein, 24 aa, Artificial Sequence
  Description of Artificial Sequence: ACTB protein peptide 13
  MOD_RES (23)..(23): Lys-carbamidomethyl oxidation
  MOD_RES (24)..(24): Methionin oxidation
LCYVALDFEQEMATAASSSSLEKM

SEQ ID NO: 17 - protein, 14 aa, Artificial Sequence
  Description of Artificial Sequence: ACTB protein peptide 14
LDLAGRDLTDYLMK

SEQ ID NO: 18 - protein, 15 aa, Artificial Sequence
  Description of Artificial Sequence: ACTB protein peptide 15
  MOD_RES (15)..(15): Methionin oxidation
LDLAGRDLTDYLMKM

SEQ ID NO: 19 - protein, 13 aa, Artificial Sequence
  Description of Artificial Sequence: ACTB protein peptide 16
QEYDESGPSIVHR

SEQ ID NO: 20 - protein, 14 aa, Artificial Sequence
  Description of Artificial Sequence: ACTB protein peptide 17
QEYDESGPSIVHRK

SEQ ID NO: 21 - protein, 16 aa, Artificial Sequence
  Description of Artificial Sequence: ACTB protein peptide 18
SYELPDGQVITIGNER

SEQ ID NO: 22 - protein, 31 aa, Artificial Sequence
  Description of Artificial Sequence: ACTB protein peptide 19
  MOD_RES (31)..(31): Methionin oxidation
TTGIVMDSGDGVTHTVPIYEGYALPHAILRM

SEQ ID NO: 23 - protein, 18 aa, Artificial Sequence
  Description of Artificial Sequence: ACTB protein peptide 20
VAPEEHPVLLTEAPLNPK

SEQ ID NO: 24 - protein, 10 aa, Artificial Sequence
  Description of Artificial Sequence: Actin beta peptide 1
AGFAGDDAPR

SEQ ID NO: 25 - protein, 11 aa, Artificial Sequence
  Description of Artificial Sequence: Actin beta peptide 2
AVFPSIVGRPR

SEQ ID NO: 26 - protein, 18 aa, Artificial Sequence
  Description of Artificial Sequence: Actin beta peptide 3
  MOD_RES (18)..(18): Methionin oxidation-carbamidomethyl oxidation
DDDIAALVVDNGSGMCKM

SEQ ID NO: 27 - protein, 22 aa, Artificial Sequence
  Description of Artificial Sequence: Actin beta peptide 4
  MOD_RES (22)..(22): Methionin oxidation
DLYANTVLSGGTTMYPGIADRM

SEQ ID NO: 28 - protein, 12 aa, Artificial Sequence
  Description of Artificial Sequence: Actin beta peptide 5
DSYVGDEAQSKR

SEQ ID NO: 29 - protein, 12 aa, Artificial Sequence
  Description of Artificial Sequence: Actin beta peptide 6
  MOD_RES (12)..(12): Methionin oxidation
EITALAPSTMKM

SEQ ID NO: 30 - protein, 10 aa, Artificial Sequence
  Description of Artificial Sequence: Actin beta peptide 7
GYSFTTTAER

SEQ ID NO: 31 - protein, 14 aa, Artificial Sequence
  Description of Artificial Sequence: Actin beta peptide 8
GYSFTTTAEREIVR

SEQ ID NO: 32 - protein, 12 aa, Artificial Sequence
  Description of Artificial Sequence: Actin beta peptide 9
  MOD_RES (12)..(12): Methionin oxidation
HQGVMVGMGQKM

SEQ ID NO: 33 - protein, 8 aa, Artificial Sequence
  Description of Artificial Sequence: Actin beta peptide 10
IIAPPERK

SEQ ID NO: 34 - protein, 9 aa, Artificial Sequence
  Description of Artificial Sequence: Actin beta peptide 11
IKIIAPPER

SEQ ID NO: 35 - protein, 11 aa, Artificial Sequence
  Description of Artificial Sequence: Actin beta peptide 12
IWHHTFYNELR

SEQ ID NO: 36 - protein, 23 aa, Artificial Sequence
  Description of Artificial Sequence: Actin beta peptide 13
  MOD_RES (23)..(23): Methionin oxidation
KDLYANTVLSGGTTMYPGIADRM

SEQ ID NO: 37 - protein, 24 aa, Artificial Sequence
  Description of Artificial Sequence: Actin beta peptide 14
  MOD_RES (23)..(23): Lys-carbamidomethyl oxidation
  MOD_RES (24)..(24): Methionin oxidation
LCYVALDFEQEMATAASSSSLEKM

SEQ ID NO: 38 - protein, 15 aa, Artificial Sequence
  Description of Artificial Sequence: Actin beta peptide 15
  MOD_RES (15)..(15): Methionin oxidation
LDLAGRDLTDYLMKM

SEQ ID NO: 39 - protein, 13 aa, Artificial Sequence
  Description of Artificial Sequence: Actin beta peptide 16
QEYDESGPSIVHR

SEQ ID NO: 40 - protein, 14 aa, Artificial Sequence
  Description of Artificial Sequence: Actin beta peptide 17
QEYDESGPSIVHRK

SEQ ID NO: 41 - protein, 16 aa, Artificial Sequence
  Description of Artificial Sequence: Actin beta peptide 18
SYELPDGQVITIGNER

SEQ ID NO: 42 - protein, 31 aa, Artificial Sequence; identical to SEQ ID NO: 22
  Description of Artificial Sequence: Actin beta peptide 19
  MOD_RES (31)..(31): Methionin oxidation

SEQ ID NO: 43 - protein, 18 aa, Artificial Sequence
  Description of Artificial Sequence: Actin beta peptide 20
VAPEEHPVLLTEAPLNPK

SEQ ID NO: 44 - protein, 15 aa, Artificial Sequence
  Description of Artificial Sequence: Afamin peptide 1
AAPQLPMEELVSLSK

SEQ ID NO: 45 - protein, 17 aa, Artificial Sequence
  Description of Artificial Sequence: Afamin peptide 2
ANVGFLPPFPTLDPEEK

SEQ ID NO: 46 - protein, 23 aa, Artificial Sequence
  Description of Artificial Sequence: Afamin peptide 3
  MOD_RES (23)..(23): Methionin oxidation-carbamidomethyl oxidation
SLAMVQQECNQFQELGKDTLQRM

SEQ ID NO: 47 - protein, 12 aa, Artificial Sequence
  Description of Artificial Sequence: Afamin peptide 4
  MOD_RES (12)..(12): Lys-carbamidomethyl oxidation-carbamidomethyl oxidation
CWADNTLPECSK

SEQ ID NO: 48 - protein, 14 aa, Artificial Sequence
  Description of Artificial Sequence: Afamin peptide 5
  MOD_RES (14)..(14): Lys-carbamidomethyl oxidation-carbamidomethyl oxidation
DRCWADNTLPECSK

SEQ ID NO: 49 - protein, 17 aa, Artificial Sequence
  Description of Artificial Sequence: Afamin peptide 6
DSDPDKFFAEFIYEYSR

SEQ ID NO: 50 - protein, 19 aa, Artificial Sequence
  Description of Artificial Sequence: Afamin peptide 7
  MOD_RES (19)..(19): Arg-carbamidomethyl oxidation
EACIINANKDDRPEGLSLR

SEQ ID NO: 51 - protein, 24 aa, Artificial Sequence
  Description of Artificial Sequence: Afamin peptide 8
  MOD_RES (24)..(24): Lys-carbamidomethyl oxidation-carbamidomethyl oxidation
FTAAREECSEVQEPESCFSPESSK

SEQ ID NO: 52 - protein, 11 aa, Artificial Sequence
  Description of Artificial Sequence: Afamin peptide 9
  MOD_RES (11)..(11): Arg-carbamidomethyl oxidation
FTESENVCQER

SEQ ID NO: 53 - protein, 8 aa, Artificial Sequence
  Description of Artificial Sequence: Afamin peptide 10
HFLVKFTK

SEQ ID NO: 54 - protein, 30 aa, Artificial Sequence
  Description of Artificial Sequence: Afamin peptide 11
  MOD_RES (30)..(30): Arg-carbamidomethyl oxidation-carbamidomethyl oxidation- carbamidomethyl oxidation
IGFKDLTTLLEDVSSMYEGCCEGDVVHCIR

SEQ ID NO: 55 - protein, 18 aa, Artificial Sequence
  Description of Artificial Sequence: Afamin peptide 12
KANVGFLPPFPTLDPEEK

SEQ ID NO: 56 - protein, 8 aa, Artificial Sequence
  Description of Artificial Sequence: Afamin peptide 13
  MOD_RES (8)..(8): Lys-carbamidomethyl oxidation
RLCFFYNK

SEQ ID NO: 57 - protein, 11 aa, Artificial Sequence
  Description of Artificial Sequence: Afamin peptide 14
  MOD_RES (11)..(11): Lys-carbamidomethyl oxidation-carbamidomethyl oxidation
TINPAVDHCCK

SEQ ID NO: 58 - protein, 17 aa, Artificial Sequence
  Description of Artificial Sequence: Afamin peptide 15
  MOD_RES (17)..(17): Arg-carbamidomethyl oxidation-carbamidomethyl oxidation
TINPAVDHCCKTDFAFR

SEQ ID NO: 59 - protein, 12 aa, Artificial Sequence
  Description of Artificial Sequence: Afamin peptide 16
VLNSINVAVFSK

SEQ ID NO: 60 - protein, 8 aa, Artificial Sequence
  Description of Artificial Sequence: Afamin peptide 17
VMLDYRDR

SEQ ID NO: 61 - protein, 9 aa, Artificial Sequence
  Description of Artificial Sequence: Afamin peptide 18
  MOD_RES (9)..(9): Methionin oxidation
VMLDYRDRM

SEQ ID NO: 62 - protein, 13 aa, Artificial Sequence
  Description of Artificial Sequence: Afamin peptide 19
  MOD_RES (13)..(13): Methionin oxidation-carbamidomethyl oxidation- carbamidomethyl oxidation
VYMDFLEDCCSRM

SEQ ID NO: 63 - protein, 17 aa, Artificial Sequence
  Description of Artificial Sequence: Afm protein peptide 1
ANVGFLPPFPTLDPEEK

SEQ ID NO: 64 - protein, 15 aa, Artificial Sequence
  Description of Artificial Sequence: Afm protein peptide 2
  MOD_RES (15)..(15): Lys-carbamidomethyl oxidation
ASSSYQRNVCGALIK

SEQ ID NO: 65 - protein, 16 aa, Artificial Sequence
  Description of Artificial Sequence: Afm protein peptide 3
  MOD_RES (16)..(16): Lys-carbamidomethyl oxidation
ATCFQAKAAPITQYLK

SEQ ID NO: 66 - protein, 12 aa, Artificial Sequence
  Description of Artificial Sequence: Afm protein peptide 4
  MOD_RES (12)..(12): Lys-carbamidomethyl oxidation-carbamidomethyl oxidation
CWADNTLPECSK

SEQ ID NO: 67 - protein, 13 aa, Artificial Sequence
  Description of Artificial Sequence: Afm protein peptide 5
DDRPEGLSLREAK

SEQ ID NO: 68 - protein, 17 aa, Artificial Sequence
  Description of Artificial Sequence: Afm protein peptide 6
DSDPDKFFAEFIYEYSR

SEQ ID NO: 69 - protein, 19 aa, Artificial Sequence
  Description of Artificial Sequence: Afm protein peptide 7
  MOD_RES (19)..(19): Arg-carbamidomethyl oxidation
EACIINANKDDRPEGLSLR

SEQ ID NO: 70 - protein, 14 aa, Artificial Sequence
  Description of Artificial Sequence: Afm protein peptide 8
  MOD_RES (14)..(14): Arg-carbamidomethyl oxidation
EAKFTESENVCQER

SEQ ID NO: 71 - protein, 11 aa, Artificial Sequence
  Description of Artificial Sequence: Afm protein peptide 9
  MOD_RES (11)..(11): Arg-carbamidomethyl oxidation
FTESENVCQER

SEQ ID NO: 72 - protein, 16 aa, Artificial Sequence
  Description of Artificial Sequence: Afm protein peptide 10
  MOD_RES (16)..(16): Methionin oxidation-carbamidomethyl oxidation- carbamidomethyl oxidation
ITKVYMDFLEDCCSRM

SEQ ID NO: 73 - protein, 18 aa, Artificial Sequence
  Description of Artificial Sequence: Afm protein peptide 11
KANVGFLPPFPTLDPEEK

SEQ ID NO: 74 - protein, 8 aa, Artificial Sequence
  Description of Artificial Sequence: Afm protein peptide 12
  MOD_RES (8)..(8): Lys-carbamidomethyl oxidation
LCFFYNKK

SEQ ID NO: 75 - protein, 12 aa, Artificial Sequence
  Description of Artificial Sequence: Afm protein peptide 13
  MOD_RES (12)..(12): Lys-carbamidomethyl oxidation
NVCGALIKFGPK

SEQ ID NO: 76 - protein, 12 aa, Artificial Sequence
  Description of Artificial Sequence: Afm protein peptide 14
QFQELGKDTLQR

SEQ ID NO: 77 - protein, 12 aa, Artificial Sequence
  Description of Artificial Sequence: Afm protein peptide 15
RHPDLSTPELLR

SEQ ID NO: 78 - protein, 11 aa, Artificial Sequence
  Description of Artificial Sequence: Afm protein peptide 16
  MOD_RES (11)..(11): Methionin oxidation-carbamidomethyl oxidation
SLAMVQQECKM

SEQ ID NO: 79 - protein, 12 aa, Artificial Sequence
  Description of Artificial Sequence: Afm protein peptide 17
  MOD_RES (12)..(12): Lys-carbamidomethyl oxidation
SQSQVVNHICSK

SEQ ID NO: 80 - protein, 19 aa, Artificial Sequence
  Description of Artificial Sequence: Afm protein peptide 18
  MOD_RES (19)..(19): Lys-carbamidomethyl oxidation
SQSQVVNHICSKQDSISSK

SEQ ID NO: 81 - protein, 12 aa, Artificial Sequence
  Description of Artificial Sequence: Afm protein peptide 19
VLNSINVAVFSK

SEQ ID NO: 82 - protein, 8 aa, Artificial Sequence
  Description of Artificial Sequence: Afm protein peptide 20
VMLDYRDR

SEQ ID NO: 83 - protein, 13 aa, Artificial Sequence
  Description of Artificial Sequence: Afm protein peptide 21
  MOD_RES (13)..(13): Methionin oxidation-carbamidomethyl oxidation- carbamidomethyl oxidation
VYMDFLEDCCSRM

SEQ ID NO: 84 - protein, 18 aa, Artificial Sequence
  Description of Artificial Sequence: Albumin (fragment) peptide 1
  MOD_RES (18)..(18): Lys-carbamidomethyl oxidation
AETFTFHSDICTLPEKEK

SEQ ID NO: 85 - protein, 14 aa, Artificial Sequence
  Description of Artificial Sequence: Albumin (fragment) peptide 2
APQVSTPTLVEAAR

SEQ ID NO: 86 - protein, 26 aa, Artificial Sequence
  Description of Artificial Sequence: Albumin (fragment) peptide 3
  MOD_RES (26)..(26): Lys-carbamidomethyl oxidation-carbamidomethyl oxidation- carbamidomethyl oxidation
CCAEANPPACYGTVLAEFQPLVEEPK

SEQ ID NO: 87 - protein, 30 aa, Artificial Sequence
  Description of Artificial Sequence: Albumin (fragment) peptide 4
  MOD_RES (30)..(30): Lys-carbamidomethyl oxidation-carbamidomethyl oxidation carbamidomethyl oxidation
CCAEANPPACYGTVLAEFQPLVEEPKNLVK

SEQ ID NO: 88 - protein, 9 aa, Artificial Sequence
  Description of Artificial Sequence: Albumin (fragment) peptide 5
  MOD_RES (9)..(9): Arg-carbamidomethyl oxidation-carbamidomethyl oxidation
CCSGSLVER

SEQ ID NO: 89 - protein, 23 aa, Artificial Sequence
  Description of Artificial Sequence: Albumin (fragment) peptide 6
  MOD_RES (23)..(23): Arg-carbamidomethyl oxidation-carbamidomethyl oxidation- carbamidomethyl oxidation
CCTLPEDQRLPCVEDYLSAILNR

SEQ ID NO: 90 - protein, 13 aa, Artificial Sequence
  Description of Artificial Sequence: Albumin (fragment) peptide 7
DVFLGTFLYEYSR

SEQ ID NO: 91 - protein, 16 aa, Artificial Sequence
  Description of Artificial Sequence: Albumin (fragment) peptide 8
ENPTTFMGHYLHEVAR

SEQ ID NO: 92 - protein, 11 aa, Artificial Sequence
  Description of Artificial Sequence: Albumin (fragment) peptide 9
HPDYSVSLLLR

SEQ ID NO: 93 - protein, 13 aa, Artificial Sequence
  Description of Artificial Sequence: Albumin (fragment) peptide 10
LGEYGFQNAILVR

SEQ ID NO: 94 - protein, 14 aa, Artificial Sequence
  Description of Artificial Sequence: Albumin (fragment) peptide 11
  MOD_RES (14)..(14): Arg-carbamidomethyl oxidation
LPCVEDYLSAILNR

SEQ ID NO: 95 - protein, 11 aa, Artificial Sequence
  Description of Artificial Sequence: Albumin (fragment) peptide 12
  MOD_RES (11)..(11): Lys-carbamidomethyl oxidation-carbamidomethyl oxidation
LQTCCDKPLLK

SEQ ID NO: 96 - protein, 12 aa, Artificial Sequence
  Description of Artificial Sequence: Albumin (fragment) peptide 13
  MOD_RES (12)..(12): Lys-carbamidomethyl oxidation-carbamidomethyl oxidation
LQTCCDKPLLKK

SEQ ID NO: 97 - protein, 15 aa, Artificial Sequence
  Description of Artificial Sequence: Albumin (fragment) peptide 14
LSQTFPNADFAEITK

SEQ ID NO: 98 - protein, 22 aa, Artificial Sequence
  Description of Artificial Sequence: Albumin (fragment) peptide 15
LSQTFPNADFAEITKLATDLTK

SEQ ID NO: 99 - protein, 19 aa, Artificial Sequence
  Description of Artificial Sequence: Albumin (fragment) peptide 16
NYAEAKDVFLGTFLYEYSR

SEQ ID NO: 100 - protein, 13 aa, Artificial Sequence
  Description of Artificial Sequence: Albumin (fragment) peptide 17
  MOD_RES (13)..(13): Lys-carbamidomethyl oxidation
QEPERNECFLQHK

SEQ ID NO: 101 - protein, 12 aa, Artificial Sequence
  Description of Artificial Sequence: Albumin (fragment) peptide 18
RHPDYSVSLLLR

SEQ ID NO: 102 - protein, 16 aa, Artificial Sequence
  Description of Artificial Sequence: Albumin (fragment) peptide 19
  MOD_RES (16)..(16): Lys-carbamidomethyl oxidation
RPCFSALTVDETYVPK

SEQ ID NO: 103 - protein, 21 aa, Artificial Sequence
  Description of Artificial Sequence: Albumin (fragment) peptide 20
  MOD_RES (21)..(21): Arg-carbamidomethyl oxidation
TNCDLYEKLGEYGFQNAILVR

SEQ ID NO: 104 - protein, 16 aa, Artificial Sequence
  Description of Artificial Sequence: Albumin (fragment) peptide 21
  MOD_RES (16)..(16): Lys-carbamidomethyl oxidation
VCLLHEKTPVSEHVTK

SEQ ID NO: 105 - protein, 12 aa, Artificial Sequence
  Description of Artificial Sequence: Albumin (fragment) peptide 22
  MOD_RES (12)..(12): Lys-carbamidomethyl oxidation
YMCENQATISSK

SEQ ID NO: 106 - protein, 18 aa, Artificial Sequence
  Description of Artificial Sequence: Albumin (fragment) peptide 23
YTQKAPQVSTPTLVEAAR

SEQ ID NO: 107 - protein, 16 aa, Artificial Sequence
  Description of Artificial Sequence: Albumin 1 peptide 1
SEIAHRYNDLGEQHFK

SEQ ID NO: 108 - protein, 18 aa, Artificial Sequence
  Description of Artificial Sequence: Albumin 1 peptide 2
  MOD_RES (18)..(18): Lys-carbamidomethyl oxidation
AETFTFHSDICTLPEKEK

SEQ ID NO: 109 - protein, 9 aa, Artificial Sequence
  Description of Artificial Sequence: Albumin 1 peptide 3
AFKAWAVAR

SEQ ID NO: 110 - protein, 32 aa, Artificial Sequence
  Description of Artificial Sequence: Albumin 1 peptide 4
  MOD_RES (31)..(31): Lys-carbamidomethyl oxidation
  MOD_RES (32)..(32): Methionin oxidation-carbamidomethyl oxidation
AHCLSEVEHDTMPADLPAIAADFVEDQEVCKM

SEQ ID NO: 111 - protein, 14 aa, Artificial Sequence
  Description of Artificial Sequence: Albumin 1 peptide 5
APQVSTPTLVEAAR

SEQ ID NO: 112 - protein, 18 aa, Artificial Sequence
  Description of Artificial Sequence: Albumin 1 peptide 6
APQVSTPTLVEAARNLGR

SEQ ID NO: 113 - protein, 26 aa, Artificial Sequence
  Description of Artificial Sequence: Albumin 1 peptide 7
  MOD_RES (26)..(26): Lys-carbamidomethyl oxidation-carbamidomethyl oxidation- carbamidomethyl oxidation
CCAEANPPACYGTVLAEFQPLVEEPK

SEQ ID NO: 114 - protein, 9 aa, Artificial Sequence
  Description of Artificial Sequence: Albumin 1 peptide 8
  MOD_RES (9)..(9): Arg-carbamidomethyl oxidation-carbamidomethyl oxidation
CCSGSLVER

SEQ ID NO: 115 - protein, 9 aa, Artificial Sequence
  Description of Artificial Sequence: Albumin 1 peptide 9
  MOD_RES (9)..(9): Arg-carbamidomethyl oxidation-carbamidomethyl oxidation
CCTLPEDQR

SEQ ID NO: 116 - protein, 23 aa, Artificial Sequence
  Description of Artificial Sequence: Albumin 1 peptide 10
  MOD_RES (23)..(23): Arg-carbamidomethyl oxidation-carbamidomethyl oxidation- carbamidomethyl oxidation
CCTLPEDQRLPCVEDYLSAILNR

SEQ ID NO: 117 - protein, 23 aa, Artificial Sequence
  Description of Artificial Sequence: Albumin 1 peptide 11
  MOD_RES (23)..(23): Methionin oxidation-carbamidomethyl oxidation
DDNPSLPPFERPEAEAMCTSFKM

SEQ ID NO: 118 - protein, 13 aa, Artificial Sequence
  Description of Artificial Sequence: Albumin 1 peptide 12
DVFLGTFLYEYSR

SEQ ID NO: 119 - protein, 14 aa, Artificial Sequence
  Description of Artificial Sequence: Albumin 1 peptide 13
DVFLGTFLYEYSRR

SEQ ID NO: 120 - protein, 10 aa, Artificial Sequence
  Description of Artificial Sequence: Albumin 1 peptide 14
EAHKSEIAHR

SEQ ID NO: 121 - protein, 19 aa, Artificial Sequence
  Description of Artificial Sequence: Albumin 1 peptide 15
  MOD_RES (19)..(19): Lys-carbamidomethyl oxidation-carbamidomethyl oxidation- carbamidomethyl oxidation
ECCHGDLLECADDRAELAK

SEQ ID NO: 122 - protein, 19 aa, Artificial Sequence
  Description of Artificial Sequence: Albumin 1 peptide 16
  MOD_RES (19)..(19): Lys-carbamidomethyl oxidation
EFKAETFTFHSDICTLPEK

SEQ ID NO: 123 - protein, 17 aa, Artificial Sequence
  Description of Artificial Sequence: Albumin 1 peptide 17
  MOD_RES (17)..(17): Methionin oxidation
ENPTTFMGHYLHEVARM

SEQ ID NO: 124 - protein, 12 aa, Artificial Sequence
  Description of Artificial Sequence: Albumin 1 peptide 18
  MOD_RES (12)..(12): Lys-carbamidomethyl oxidation-carbamidomethyl oxidation
ENYGELADCCTK

SEQ ID NO: 125 - protein, 11 aa, Artificial Sequence
  Description of Artificial Sequence: Albumin 1 peptide 19
HPDYSVSLLLR

SEQ ID NO: 126 - protein, 20 aa, Artificial Sequence
  Description of Artificial Sequence: Albumin 1 peptide 20
  MOD_RES (20)..(20): Lys-carbamidomethyl oxidation-carbamidomethyl oxidation- carbamidomethyl oxidation
LCAIPNLRENYGELADCCTK

SEQ ID NO: 127 - protein, 13 aa, Artificial Sequence
  Description of Artificial Sequence: Albumin 1 peptide 21
LGEYGFQNAILVR

SEQ ID NO: 128 - protein, 14 aa, Artificial Sequence
  Description of Artificial Sequence: Albumin 1 peptide 22
  MOD_RES (14)..(14): Arg-carbamidomethyl oxidation
LPCVEDYLSAILNR

SEQ ID NO: 129 - protein, 11 aa, Artificial Sequence
  Description of Artificial Sequence: Albumin 1 peptide 23
  MOD_RES (11)..(11): Lys-carbamidomethyl oxidation-carbamidomethyl oxidation
LQTCCDKPLLK

SEQ ID NO: 130 - protein, 12 aa, Artificial Sequence
  Description of Artificial Sequence: Albumin 1 peptide 24
  MOD_RES (12)..(12): Lys-carbamidomethyl oxidation-carbamidomethyl oxidation
LQTCCDKPLLKK

SEQ ID NO: 131 - protein, 15 aa, Artificial Sequence
  Description of Artificial Sequence: Albumin 1 peptide 25
LSQTFPNADFAEITK

SEQ ID NO: 132 - protein, 10 aa, Artificial Sequence
  Description of Artificial Sequence: Albumin 1 peptide 26
LVQEVTDFAK

SEQ ID NO: 133 - protein, 13 aa, Artificial Sequence
  Description of Artificial Sequence: Albumin 1 peptide 27
  MOD_RES (13)..(13): Lys-carbamidomethyl oxidation
QEPERNECFLQHK

SEQ ID NO: 134 - protein, 12 aa, Artificial Sequence
  Description of Artificial Sequence: Albumin 1 peptide 28
RHPDYSVSLLLR

SEQ ID NO: 135 - protein, 16 aa, Artificial Sequence
  Description of Artificial Sequence: Albumin 1 peptide 29
  MOD_RES (16)..(16): Lys-carbamidomethyl oxidation
RPCFSALTVDETYVPK

SEQ ID NO: 136 - protein, 19 aa, Artificial Sequence
  Description of Artificial Sequence: Albumin 1 peptide 30
  MOD_RES (19)..(19): Lys-carbamidomethyl oxidation
RPCFSALTVDETYVPKEFK

SEQ ID NO: 137 - protein, 17 aa, Artificial Sequence
  Description of Artificial Sequence: Albumin 1 peptide 31
  MOD_RES (17)..(17): Arg-carbamidomethyl oxidation
SLHTLFGDKLCAIPNLR

SEQ ID NO: 138 - protein, 21 aa, Artificial Sequence
  Description of Artificial Sequence: Albumin 1 peptide 32
  MOD_RES (21)..(21): Arg-carbamidomethyl oxidation
TNCDLYEKLGEYGFQNAILVR

SEQ ID NO: 139 - protein, 15 aa, Artificial Sequence
  Description of Artificial Sequence: Albumin 1 peptide 33
  MOD_RES (15)..(15): Lys-carbamidomethyl oxidation-carbamidomethyl oxidation
TVMDDFAQFLDTCCK

SEQ ID NO: 140 - protein, 13 aa, Artificial Sequence
  Description of Artificial Sequence: Albumin 1 peptide 34
  MOD_RES (13)..(13): Methionin oxidation-carbamidomethyl oxidation
YMCENQATISSKM

SEQ ID NO: 141 - protein, 10 aa, Artificial Sequence
  Description of Artificial Sequence: Albumin 1 peptide 35
YNDLGEQHFK

SEQ ID NO: 142 - protein, 23 aa, Artificial Sequence
  Description of Artificial Sequence: Albumin 1 peptide 36
YNDLGEQHFKGLVLIAFSQYLQK

SEQ ID NO: 143 - protein, 18 aa, Artificial Sequence
  Description of Artificial Sequence: Albumin 1 peptide 37
YTQKAPQVSTPTLVEAAR

SEQ ID NO: 144 - protein, 15 aa, Artificial Sequence
  Description of Artificial Sequence: Alpha fetoprotein peptide 1
ALQTMKQELLINLVK

SEQ ID NO: 145 - protein, 14 aa, Artificial Sequence
  Description of Artificial Sequence: Alpha fetoprotein peptide 2
  MOD_RES (14)..(14): Lys-carbamidomethyl oxidation
AQDQEVCFTEEGPK

SEQ ID NO: 146 - protein, 18 aa, Artificial Sequence
  Description of Artificial Sequence: Alpha fetoprotein peptide 3
  MOD_RES (18)..(18): Lys-carbamidomethyl oxidation
AQDQEVCFTEEGPKLISK

SEQ ID NO: 147 - protein, 20 aa, Artificial Sequence
  Description of Artificial Sequence: Alpha fetoprotein peptide 4
  MOD_RES (20)..(20): Lys-carbamidomethyl oxidation-carbamidomethyl oxidation
CSQSGNLPGCQDNLEEELQK

SEQ ID NO: 148 - protein, 30 aa, Artificial Sequence
  Description of Artificial Sequence: Alpha fetoprotein peptide 5
  MOD_RES (30)..(30): Lys-carbamidomethyl oxidation-carbamidomethyl oxidation
CSQSGNLPGCQDNLEEELQKHIEESQALSK

SEQ ID NO: 149 - protein, 13 aa, Artificial Sequence
  Description of Artificial Sequence: Alpha fetoprotein peptide 6
DETYAPPPFSEDK

SEQ ID NO: 150 - protein, 14 aa, Artificial Sequence
  Description of Artificial Sequence: Alpha fetoprotein peptide 7
  MOD_RES (14)..(14): Arg-carbamidomethyl oxidation
EGSMLNEHVCSVIR

SEQ ID NO: 151 - protein, 18 aa, Artificial Sequence
  Description of Artificial Sequence: Alpha fetoprotein peptide 8
  MOD_RES (18)..(18): Methionin oxidation-carbamidomethyl oxidation
ELREGSMLNEHVCSVIRM

SEQ ID NO: 152 - protein, 8 aa, Artificial Sequence
  Description of Artificial Sequence: Alpha fetoprotein peptide 9
FIYEVSRR

SEQ ID NO: 153 - protein, 11 aa, Artificial Sequence
  Description of Artificial Sequence: Alpha fetoprotein peptide 10
LQNLFLIGYTR

SEQ ID NO: 154 - protein, 19 aa, Artificial Sequence
  Description of Artificial Sequence: Alpha fetoprotein peptide 11
  MOD_RES (19)..(19): Methionin oxidation
NPFMYAPAILSLAAQYDKM

SEQ ID NO: 155 - protein, 27 aa, Artificial Sequence
  Description of Artificial Sequence: Alpha fetoprotein peptide 12
  MOD_RES (27)..(27): Lys-carbamidomethyl oxidation-carbamidomethyl oxidation
NSGDGCLESQLSVFLDEICHETELSNK

SEQ ID NO: 156 - protein, 23 aa, Artificial Sequence
  Description of Artificial Sequence: Alpha fetoprotein peptide 13
QKPELTEEQLAAVTADFSGLLEK

SEQ ID NO: 157 - protein, 24 aa, Artificial Sequence
  Description of Artificial Sequence: Alpha fetoprotein peptide 14
  MOD_RES (24)..(24): Arg-carbamidomethyl oxidation
QSCALYQTLGDYKLQNLFLIGYTR

SEQ ID NO: 158 - protein, 19 aa, Artificial Sequence
  Description of Artificial Sequence: Alpha fetoprotein peptide 15
  MOD_RES (19)..(19): Lys-carbamidomethyl oxidation
TAPASVPPFQFPEPAESCK

SEQ ID NO: 159 - protein, 25 aa, Artificial Sequence
  Description of Artificial Sequence: Alpha fetoprotein peptide 16
  MOD_RES (25)..(25): Arg-carbamidomethyl oxidation
TAPASVPPFQFPEPAESCKAHEENR

SEQ ID NO: 160 - protein, 12 aa, Artificial Sequence
  Description of Artificial Sequence: Alpha fetoprotein peptide 17
THPNLPVSVILR

SEQ ID NO: 161 - protein, 15 aa, Artificial Sequence
  Description of Artificial Sequence: Alpha fetoprotein peptide 18
  MOD_RES (15)..(15): Lys-carbamidomethyl oxidation
VMTYICSQQNILSSK

SEQ ID NO: 162 - protein, 14 aa, Artificial Sequence
  Description of Artificial Sequence: Alpha fetoprotein peptide 19
  MOD_RES (14)..(14): Arg-carbamidomethyl oxidation-carbamidomethyl oxidation
YGLSGCCSQSGVER

SEQ ID NO: 163 - protein, 14 aa, Artificial Sequence
  Description of Artificial Sequence: Alpha fetoprotein peptide 20
APQVSTPTLVEAAR

SEQ ID NO: 164 - protein, 9 aa, Artificial Sequence
  Description of Artificial Sequence: Alpha fetoprotein peptide 21
  MOD_RES (9)..(9): Arg-carbamidomethyl oxidation-carbamidomethyl oxidation
CCSGSLVER

SEQ ID NO: 165 - protein, 23 aa, Artificial Sequence
  Description of Artificial Sequence: Alpha fetoprotein peptide 22
  MOD_RES (23)..(23): Arg-carbamidomethyl oxidation-carbamidomethyl oxidation- carbamidomethyl oxidation
CCTLPEDQRLPCVEDYLSAILNR

SEQ ID NO: 166 - protein, 13 aa, Artificial Sequence
  Description of Artificial Sequence: Alpha fetoprotein peptide 23
DVFLGTFLYEYSR

SEQ ID NO: 167 - protein, 11 aa, Artificial Sequence
  Description of Artificial Sequence: Alpha fetoprotein peptide 24
HPDYSVSLLLR

SEQ ID NO: 168 - protein, 13 aa, Artificial Sequence
  Description of Artificial Sequence: Alpha fetoprotein peptide 25
LGEYGFQNAILVR

SEQ ID NO: 169 - protein, 14 aa, Artificial Sequence
  Description of Artificial Sequence: Alpha fetoprotein peptide 26
  MOD_RES (14)..(14): Arg-carbamidomethyl oxidation
LPCVEDYLSAILNR

SEQ ID NO: 170 - protein, 11 aa, Artificial Sequence
  Description of Artificial Sequence: Alpha fetoprotein peptide 27
  MOD_RES (11)..(11): Lys-carbamidomethyl oxidation-carbamidomethyl oxidation
LQTCCDKPLLK

SEQ ID NO: 171 - protein, 12 aa, Artificial Sequence
  Description of Artificial Sequence: Alpha fetoprotein peptide 28
  MOD_RES (12)..(12): Lys-carbamidomethyl oxidation-carbamidomethyl oxidation
LQTCCDKPLLKK

SEQ ID NO: 172 - protein, 15 aa, Artificial Sequence
  Description of Artificial Sequence: Alpha fetoprotein peptide 29
LSQTFPNADFAEITK

SEQ ID NO: 173 - protein, 22 aa, Artificial Sequence
  Description of Artificial Sequence: Alpha fetoprotein peptide 30
LSQTFPNADFAEITKLATDLTK

SEQ ID NO: 174 - protein, 19 aa, Artificial Sequence
  Description of Artificial Sequence: Alpha fetoprotein peptide 31
NYAEAKDVFLGTFLYEYSR

SEQ ID NO: 175 - protein, 12 aa, Artificial Sequence
  Description of Artificial Sequence: Alpha fetoprotein peptide 32
RHPDYSVSLLLR

SEQ ID NO: 176 - protein, 21 aa, Artificial Sequence
  Description of Artificial Sequence: Alpha fetoprotein peptide 33
  MOD_RES (21)..(21): Arg-carbamidomethyl oxidation
TNCDLYEKLGEYGFQNAILVR

SEQ ID NO: 177 - protein, 16 aa, Artificial Sequence
  Description of Artificial Sequence: Alpha fetoprotein peptide 34
  MOD_RES (16)..(16): Lys-carbamidomethyl oxidation
VCLLHEKTPVSEHVTK

SEQ ID NO: 178 - protein, 13 aa, Artificial Sequence
  Description of Artificial Sequence: Alpha fetoprotein peptide 35
  MOD_RES (13)..(13): Methionin oxidation-carbamidomethyl oxidation
YMCENQATISSKM

SEQ ID NO: 179 - protein, 18 aa, Artificial Sequence
  Description of Artificial Sequence: Alpha fetoprotein peptide 36
YTQKAPQVSTPTLVEAAR

SEQ ID NO: 180 - protein, 30 aa, Artificial Sequence
  Description of Artificial Sequence: Alpha-1 protease inhibitor 2 peptide 1
AVLTIDETGTEAAAATVFEAVPMSMPPILR

SEQ ID NO: 181 - protein, 22 aa, Artificial Sequence
  Description of Artificial Sequence: Alpha-1 protease inhibitor 2 peptide 2
DQSPASHEIATNLGDFAISLYR

SEQ ID NO: 182 - protein, 22 aa, Artificial Sequence
  Description of Artificial Sequence: Alpha-1 protease inhibitor 2 peptide 3
FDHPFLFIIFEEHTQSPIFVGK

SEQ ID NO: 183 - protein, 25 aa, Artificial Sequence
  Description of Artificial Sequence: Alpha-1 protease inhibitor 2 peptide 4
FLEEAKNHYQAEVFSVNFAESEEAK

SEQ ID NO: 184 - protein, 19 aa, Artificial Sequence
  Description of Artificial Sequence: Alpha-1 protease inhibitor 2 peptide 5
IFNNGADLSGITEENAPLK

SEQ ID NO: 185 - protein, 22 aa, Artificial Sequence
  MOD_RES: Description of Artificial Sequence: Alpha-1 protease inhibitor 2 peptide 6
IFNNGADLSGITEENAPLKLSK

SEQ ID NO: 186 - protein, 23 aa, Artificial Sequence
  Description of Artificial Sequence: Alpha-1 protease inhibitor 2 peptide 7
IVEAVKELDQDTVFALANYILFK

SEQ ID NO: 187 - protein, 17 aa, Artificial Sequence
  Description of Artificial Sequence: Alpha-1 protease inhibitor 2 peptide 8
KPFDPENTEEAEFHVDK

SEQ ID NO: 188 - protein, 9 aa, Artificial Sequence
  Description of Artificial Sequence: Alpha-1 protease inhibitor 2 peptide 9
KVINDFVEK

SEQ ID NO: 189 - protein, 10 aa, Artificial Sequence
  Description of Artificial Sequence: Alpha-1 protease inhibitor 2 peptide 10
LSISGDYNLK

SEQ ID NO: 190 - protein, 20 aa, Artificial Sequence
  Description of Artificial Sequence: Alpha-1 protease inhibitor 2 peptide 11
LSISGDYNLKTLMSPLGITR

SEQ ID NO: 191 - protein, 10 aa, Artificial Sequence
  Description of Artificial Sequence: Alpha-1 protease inhibitor 2 peptide 12
MQHLEQTLNK

SEQ ID NO: 192 - protein, 15 aa, Artificial Sequence
  Description of Artificial Sequence: Alpha-1 protease inhibitor 2 peptide 13
MQHLEQTLNKELISK

SEQ ID NO: 193 - protein, 19 aa, Artificial Sequence
  Description of Artificial Sequence: Alpha-1 protease inhibitor 2 peptide 14
NHYQAEVFSVNFAESEEAK

SEQ ID NO: 194 - protein, 20 aa, Artificial Sequence
  Description of Artificial Sequence: Alpha-1 protease inhibitor 2 peptide 15
NHYQAEVFSVNFAESEEAKK

SEQ ID NO: 195 - protein, 31 aa, Artificial Sequence
  Description of Artificial Sequence: Alpha-1 protease inhibitor 2 peptide 16
SFQHLLQTLNRPDSELQLSTGNGLFVNNDLK

SEQ ID NO: 196 - protein, 10 aa, Artificial Sequence
  Description of Artificial Sequence: Alpha-1 protease inhibitor 2 peptide 18
TLMSPLGITR

SEQ ID NO: 197 - protein, 13 aa, Artificial Sequence
  Description of Artificial Sequence: Alpha-1 protease inhibitor 2 peptide 18
VINDFVEKGTQGK

SEQ ID NO: 198 - protein, 19 aa, Artificial Sequence
  Description of Artificial Sequence: Alpha-1 protease inhibitor 2 peptide 19
WKKPFDPENTEEAEFHVDK

SEQ ID NO: 199 - protein, 14 aa, Artificial Sequence
  Description of Artificial Sequence: Alpha-2 macroglobulin MUG1 peptide 1
ADSHFRHGIPFFVK

SEQ ID NO: 200 - protein, 15 aa, Artificial Sequence
  Description of Artificial Sequence: Alpha-2 macroglobulin MUG1 peptide 2
AHFSVMGDILSSAIR

SEQ ID NO: 201 - protein, 15 aa, Artificial Sequence
  Description of Artificial Sequence: Alpha-2 macroglobulin MUG1 peptide 3
ALMAYAFALAGNQNK

SEQ ID NO: 202 - protein, 17 aa, Artificial Sequence
  Description of Artificial Sequence: Alpha-2 macroglobulin MUG1 peptide 4
  MOD_RES (17)..(17): Methionin oxidation
ALMAYAFALAGNQNKRM

SEQ ID NO: 203 - protein, 10 aa, Artificial Sequence
  Description of Artificial Sequence: Alpha-2 macroglobulin MUG1 peptide 5
  MOD_RES (10)..(10): Lys-carbamidomethyl oxidation
ALSCLESSWK

SEQ ID NO: 204 - protein, 14 aa, Artificial Sequence
  Description of Artificial Sequence: Alpha-2 macroglobulin MUG1 peptide 6
DGSYSAFGDQNGER

SEQ ID NO: 205 - protein, 12 aa, Artificial Sequence
  Description of Artificial Sequence: Alpha-2 macroglobulin MUG1 peptide 7
EGNTWLTAFVLK

SEQ ID NO: 206 - protein, 19 aa, Artificial Sequence
  Description of Artificial Sequence: Alpha-2 macroglobulin MUG1 peptide 8
ESGEKEEHSFTVMEFVLPR

SEQ ID NO: 207 - protein, 20 aa, Artificial Sequence
  Description of Artificial Sequence: Alpha-2 macroglobulin MUG1 peptide 9
ESVVFVQTDKPVYKPGQSVK

SEQ ID NO: 208 - protein, 18 aa, Artificial Sequence
  Description of Artificial Sequence: Alpha-2 macroglobulin MUG1 peptide 10
  MOD_RES (17)..(18): Methionin oxidation
FALEIPVEFSMVPMAKMM

SEQ ID NO: 209 - protein, 13 aa, Artificial Sequence
  Description of Artificial Sequence: Alpha-2 macroglobulin MUG1 peptide 11
FSTSQSLPASQTR

SEQ ID NO: 210 - protein, 15 aa, Artificial Sequence
  Description of Artificial Sequence: Alpha-2 macroglobulin MUG1 peptide 12
HTNLVPHGTEKDVYR

SEQ ID NO: 211 - protein, 10 aa, Artificial Sequence
  Description of Artificial Sequence: Alpha-2 macroglobulin MUG1 peptide 13
HTSSWLVTPK

SEQ ID NO: 212 - protein, 11 aa, Artificial Sequence
  Description of Artificial Sequence: Alpha-2 macroglobulin MUG1 peptide 14
HVAYAVYSLSK

SEQ ID NO: 213 - protein, 18 aa, Artificial Sequence
  Description of Artificial Sequence: Alpha-2 macroglobulin MUG1 peptide 15
  MOD_RES (17)..(17): Arg-carbamidomethyl oxidation
  MOD_RES (18)..(18): Methionin oxidation
LPIICFDYGMVPISAPRM

SEQ ID NO: 214 - protein, 14 aa, Artificial Sequence
  Description of Artificial Sequence: Alpha-2 macroglobulin MUG1 peptide 16
  MOD_RES (14)..(14): Arg-carbamidomethyl oxidation
LQVTASPQSLCGLR

SEQ ID NO: 215 - protein, 18 aa, Artificial Sequence
  Description of Artificial Sequence: Alpha-2 macroglobulin MUG1 peptide 17
  MOD_RES (18)..(18): Lys-carbamidomethyl oxidation
LSEDQEDCILYSSWLAEK

SEQ ID NO: 216 - protein, 23 aa, Artificial Sequence
  Description of Artificial Sequence: Alpha-2 macroglobulin MUG1 peptide 18
LSSSDEEDFLYVDIKGPTHEFSK

SEQ ID NO: 217 - protein, 13 aa, Artificial Sequence
  Description of Artificial Sequence: Alpha-2 macroglobulin MUG1 peptide 19
LVDIKGDPIPNEK

SEQ ID NO: 218 - protein, 19 aa, Artificial Sequence
  Description of Artificial Sequence: Alpha-2 macroglobulin MUG1 peptide 20
MLRPLNELLPLAYIEDPKK

SEQ ID NO: 219 - protein, 13 aa, Artificial Sequence
  Description of Artificial Sequence: Alpha-2 macroglobulin MUG1 peptide 21
MLSGFIPLKPTVK

SEQ ID NO: 220 - protein, 11 aa, Artificial Sequence
  Description of Artificial Sequence: Alpha-2 macroglobulin MUG1 peptide 22
MSLVLPPTVVK

SEQ ID NO: 221 - protein, 15 aa, Artificial Sequence
  Description of Artificial Sequence: Alpha-2 macroglobulin MUG1 peptide 23
MSLVLPPTVVKDSAR

SEQ ID NO: 222 - protein, 22 aa, Artificial Sequence
  Description of Artificial Sequence: Alpha-2 macroglobulin MUG1 peptide 24
NKESVVFVQTDKPVYKPGQSVK

SEQ ID NO: 223 - protein, 22 aa, Artificial Sequence
  Description of Artificial Sequence: Alpha-2 macroglobulin MUG1 peptide 25
  MOD_RES (22)..(22): Arg-carbamidomethyl oxidation
NLFDELVLDKDLFQCVSFIIPR

SEQ ID NO: 224 - protein, 17 aa, Artificial Sequence
  Description of Artificial Sequence: Alpha-2 macroglobulin MUG1 peptide 26
  MOD_RES (17)..(17): Methionin oxidation
QMSFSLAAEPIQGPYKM

SEQ ID NO: 225 - protein, 23 aa, Artificial Sequence
  Description of Artificial Sequence: Alpha-2 macroglobulin MUG1 peptide 27
QQNSNGGFSSTQDTVVALDALSK

SEQ ID NO: 226 - protein, 16 aa, Artificial Sequence
  Description of Artificial Sequence: Alpha-2 macroglobulin MUG1 peptide 28
SLDEEAIKENNSIHWK

SEQ ID NO: 227 - protein, 18 aa, Artificial Sequence
  Description of Artificial Sequence: Alpha-2 macroglobulin MUG1 peptide 29
SQKTTLVTIQSTGSFSQK

SEQ ID NO: 228 - protein, 15 aa, Artificial Sequence
  Description of Artificial Sequence: Alpha-2 macroglobulin MUG1 peptide 30
TTLVTIQSTGSFSQK

SEQ ID NO: 229 - protein, 12 aa, Artificial Sequence
  Description of Artificial Sequence: Alpha-2 macroglobulin MUG1 peptide 31
YTYGKPVPGHVK

SEQ ID NO: 230 - protein, 17 aa, Artificial Sequence
  Description of Artificial Sequence: Alpha-2-HS-glycoprotein (Fetuin) peptide 1
  MOD_RES (17)..(17): Lys-carbamidomethyl oxidation
ANLMHNLGGEEVSVACK

SEQ ID NO: 231 - protein, 24 aa, Artificial Sequence
  Description of Artificial Sequence: Alpha-2-HS-glycoprotein (Fetuin) peptide 2
  MOD_RES (24)..(24): Lys-carbamidomethyl oxidation
AQNVPLPVSTLVEFVIAATDCTAK

SEQ ID NO: 232 - protein, 7 aa, Artificial Sequence
  Description of Artificial Sequence: Alpha-2-HS-glycoprotein (Fetuin) peptide 3
CNLLAEK

SEQ ID NO: 233 - protein, 13 aa, Artificial Sequence
  Description of Artificial Sequence: Alpha-2-HS-glycoprotein (Fetuin) peptide 4
  MOD_RES (13)..(13): Lys-carbamidomethyl oxidation-carbamidomethyl oxidation
CNLLAEKQHGFCK

SEQ ID NO: 234 - protein, 29 aa, Artificial Sequence
  Description of Artificial Sequence: Alpha-2-HS-glycoprotein (Fetuin) peptide 5
  MOD_RES (29)..(29): Lys-carbamidomethyl oxidation
ELACDDPEAEQVALLAVDYLNNHLLQGFK

SEQ ID NO: 235 - protein, 14 aa, Artificial Sequence
  Description of Artificial Sequence: Alpha-2-HS-glycoprotein (Fetuin) peptide 6
  MOD_RES (14)..(14): Lys-carbamidomethyl oxidation
EVTDPAKCNLLAEK

SEQ ID NO: 236 - protein, 21 aa, Artificial Sequence
  Description of Artificial Sequence: Alpha-2-HS-glycoprotein (Fetuin) peptide 7
HAFSPVASVESASGETLHSPK

SEQ ID NO: 237 - protein, 17 aa, Artificial Sequence
  Description of Artificial Sequence: Alpha-2-HS-glycoprotein (Fetuin) peptide 8
  MOD_RES (17)..(17): Lys-carbamidomethyl oxidation
QLTEHAVEGDCDFHILK

SEQ ID NO: 238 - protein, 23 aa, Artificial Sequence
  Description of Artificial Sequence: Alpha-2-HS-glycoprotein (Fetuin) peptide 9
  MOD_RES (23)..(23): Arg-carbamidomethyl oxidation
QLTEHAVEGDCDFHILKQDGQFR

SEQ ID NO: 239 - protein, 8 aa, Artificial Sequence
  Description of Artificial Sequence: Alpha-2-HS-glycoprotein (Fetuin) peptide 10
QVLNQIDK

SEQ ID NO: 240 - protein, 10 aa, Artificial Sequence
  Description of Artificial Sequence: Alpha-2-HS-glycoprotein (Fetuin) peptide 11
QVLNQIDKVK

SEQ ID NO: 241 - protein, 6 aa, Artificial Sequence
  Description of Artificial Sequence: Alpha-2-HS-glycoprotein (Fetuin) peptide 12
TYHDLR

SEQ ID NO: 242 - protein, 17 aa, Artificial Sequence
  Description of Artificial Sequence: Alpha-2-HS-glycoprotein (Fetuin) peptide 13
  MOD_RES (17)..(17): Arg-carbamidomethyl oxidation
VGQPGAAGPVSPMCPGR

SEQ ID NO: 243 - protein, 22 aa, Artificial Sequence
  Description of Artificial Sequence: Amylase 1 peptide 1
AHFSISNSAEDPFIAIHAESKI

SEQ ID NO: 244 - protein, 12 aa, Artificial Sequence
  Description of Artificial Sequence: Amylase 1 peptide 2
AILDKLHNLNTK

SEQ ID NO: 245 - protein, 12 aa, Artificial Sequence
  Description of Artificial Sequence: Amylase 1 peptide 3
ALVFVDNHDNQR

SEQ ID NO: 246 - protein, 16 aa, Artificial Sequence
  Description of Artificial Sequence: Amylase 1 peptide 4
DFPGVPYSGFDFNDGK

SEQ ID NO: 247 - protein, 16 aa, Artificial Sequence
  Description of Artificial Sequence: Amylase 1 peptide 5
GHGAGGASILTFWDAR

SEQ ID NO: 248 - protein, 15 aa, Artificial Sequence
  Description of Artificial Sequence: Amylase 1 peptide 6
LSGLLDLALEKDYVR

SEQ ID NO: 249 - protein, 14 aa, Artificial Sequence
  Description of Artificial Sequence: Amylase 1 peptide 7
  MOD_RES (14)..(14): Methionin oxidation
NWGEGWGLMPSDRM

SEQ ID NO: 250 - protein, 13 aa, Artificial Sequence
  Description of Artificial Sequence: Amylase 1 peptide 8
SGNEDEFRDMVNR

SEQ ID NO: 251 - protein, 10 aa, Artificial Sequence
  Description of Artificial Sequence: Amylase 1 peptide 9
TAIVHLFEWR

SEQ ID NO: 252 - protein, 16 aa, Artificial Sequence
  Description of Artificial Sequence: Amylase 1 peptide 10
TASGGIENYQDAAQVR

SEQ ID NO: 253 - protein, 18 aa, Artificial Sequence
  Description of Artificial Sequence: Amylase 1 peptide 11
  MOD_RES (18)..(18): Methionin oxidation
VADYMNHLIDIGVAGFRM

SEQ ID NO: 254 - protein, 9 aa, Artificial Sequence
  Description of Artificial Sequence: Amylase 1 peptide 12
VMSSYYWPR

SEQ ID NO: 255 - protein, 10 aa, Artificial Sequence
  Description of Artificial Sequence: Amylase 1 peptide 13
  MOD_RES (10)..(10): Arg-carbamidomethyl oxidation
WVDIAKECER

SEQ ID NO: 256 - protein, 34 aa, Artificial Sequence
  Description of Artificial Sequence: Anti-colorectal carcinoma light chain peptide 1
  MOD_RES (34)..(34): Lys-carbamidomethyl oxidation
ADAAPTVSIFPPSSEQLTSGGASVVCFLNNFYPK

SEQ ID NO: 257 - protein, 18 aa, Artificial Sequence
  Description of Artificial Sequence: Anti-colorectal carcinoma light chain peptide 2
ASQDINSYLSWFQQKPGK

SEQ ID NO: 258 - protein, 11 aa, Artificial Sequence
  Description of Artificial Sequence: Anti-colorectal carcinoma light chain peptide 3
  MOD_RES (11)..(11): Lys-carbamidomethyl oxidation
HNSYTCEATHK

SEQ ID NO: 259 - protein, 16 aa, Artificial Sequence
  Description of Artificial Sequence: Anti-colorectal carcinoma light chain peptide 4
  MOD_RES (16)..(16): Methionin oxidation
MTQSPSSMYASLGERM

SEQ ID NO: 260 - protein, 35 aa, Artificial Sequence
  Description of Artificial Sequence: Anti-colorectal carcinoma light chain peptide 5
  MOD_RES (35)..(35): Lys-carbamidomethyl oxidation
RADAAPTVSIFPPSSEQLTSGGASVVCFLNNFYPK

SEQ ID NO: 261 - protein, 18 aa, Artificial Sequence
  Description of Artificial Sequence: Anti-colorectal carcinoma light chain peptide 6
  MOD_RES (18)..(18): Methionin oxidation
TPAQFLGILLLWFPGMKM

SEQ ID NO: 262 - protein, 9 aa, Artificial Sequence
  Description of Artificial Sequence: Apolipoprotein A1 l peptide 1
ARPALEDLR

SEQ ID NO: 263 - protein, 15 aa, Artificial Sequence
  Description of Artificial Sequence: Apolipoprotein A1 l peptide 2
DFANVYVDAVKDSGR

SEQ ID NO: 264 - protein, 14 aa, Artificial Sequence
  Description of Artificial Sequence: Apolipoprotein A1 l peptide 3
DFWDNLEKETDWVR

SEQ ID NO: 265 - protein, 12 aa, Artificial Sequence
  Description of Artificial Sequence: Apolipoprotein A1 l peptide 4
  MOD_RES (12)..(12): Methionin oxidation
HSLMPMLETLKM

SEQ ID NO: 266 - protein, 16 aa, Artificial Sequence
  Description of Artificial Sequence: Apolipoprotein A1 l peptide 5
LAELKSNPTLNEYHTR

SEQ ID NO: 267 - protein, 11 aa, Artificial Sequence
  Description of Artificial Sequence: Apolipoprotein A1 l peptide 6
LSPVAEEFRDR

SEQ ID NO: 268 - protein, 9 aa, Artificial Sequence
  Description of Artificial Sequence: Apolipoprotein A1 l peptide 7
MRTHVDSLR

SEQ ID NO: 269 - protein, 9 aa, Artificial Sequence
  Description of Artificial Sequence: Apolipoprotein A1 l peptide 8
QKLQELQGR

SEQ ID NO: 270 - protein, 12 aa, Artificial Sequence
  Description of Artificial Sequence: Apolipoprotein A1 l peptide 9
QKVQPYLDEFQK

SEQ ID NO: 271 - protein, 11 aa, Artificial Sequence
  Description of Artificial Sequence: Apolipoprotein A1 l peptide 10
SNPTLNEYHTR

SEQ ID NO: 272 - protein, 11 aa, Artificial Sequence
  Description of Artificial Sequence: Apolipoprotein A1 l peptide 11
TQLAPHSEQMR

SEQ ID NO: 273 - protein, 18 aa, Artificial Sequence
  Description of Artificial Sequence: Apolipoprotein A1 l peptide 12
  MOD_RES (18)..(18): Methionin oxidation
TQLAPHSEQMRESLAQRM

SEQ ID NO: 274 - protein, 17 aa, Artificial Sequence
  Description of Artificial Sequence: Apolipoprotein A1 l peptide 13
TQVQSVIDKASETLTAQ

SEQ ID NO: 275 - protein, 15 aa, Artificial Sequence
  Description of Artificial Sequence: Apolipoprotein A1 l peptide 14
VAPLGAELQESARQK

SEQ ID NO: 276 - protein, 13 aa, Artificial Sequence
  Description of Artificial Sequence: Apolipoprotein A1 l peptide 15
VKDFANVYVDAVK

SEQ ID NO: 277 - protein, 10 aa, Artificial Sequence
  Description of Artificial Sequence: Apolipoprotein A1 l peptide 16
VQPYLDEFQK

SEQ ID NO: 278 - protein, 11 aa, Artificial Sequence
  Description of Artificial Sequence: Apolipoprotein A1 l peptide 17
VQPYLDEFQKK

SEQ ID NO: 279 - protein, 9 aa, Artificial Sequence
  Description of Artificial Sequence: Apolipoprotein A1 l peptide 18
WKEDVELYR

SEQ ID NO: 280 - protein, 10 aa, Artificial Sequence
  Description of Artificial Sequence: Apolipoprotein A4 peptide 1
ALVQQLEQFR

SEQ ID NO: 281 - protein, 29 aa, Artificial Sequence
  Description of Artificial Sequence: Apolipoprotein A4 peptide 2
ALVQQLEQFRQQLGPNSGEVESHLSFLEK

SEQ ID NO: 282 - protein, 12 aa, Artificial Sequence
  Description of Artificial Sequence: Apolipoprotein A4 peptide 3
ATIDQNLEDLRR

SEQ ID NO: 283 - protein, 22 aa, Artificial Sequence
  Description of Artificial Sequence: Apolipoprotein A4 peptide 4
EAVEQFQKTDVTQQLSTLFQDK

SEQ ID NO: 284 - protein, 12 aa, Artificial Sequence
  Description of Artificial Sequence: Apolipoprotein A4 peptide 5
EKVNSFMSTLEK

SEQ ID NO: 285 - protein, 18 aa, Artificial Sequence
  Description of Artificial Sequence: Apolipoprotein A4 peptide 6
FLKAAVLTLALVAITGTR

SEQ ID NO: 286 - protein, 34 aa, Artificial Sequence
  Description of Artificial Sequence: Apolipoprotein A4 peptide 7
GSPDQPQALPLPEQAQEQAQEQAQEQVQPKPLES

SEQ ID NO: 287 - protein, 14 aa, Artificial Sequence
  Description of Artificial Sequence: Apolipoprotein A4 peptide 8
LGDASTYADGVHNK

SEQ ID NO: 288 - protein, 13 aa, Artificial Sequence
  Description of Artificial Sequence: Apolipoprotein A4 peptide 9
LNHQMEGLAFQMK

SEQ ID NO: 289 - protein, 14 aa, Artificial Sequence
  Description of Artificial Sequence: Apolipoprotein A4 peptide 10
LNHQMEGLAFQMKK

SEQ ID NO: 290 - protein, 24 aa, Artificial Sequence
  Description of Artificial Sequence: Apolipoprotein A4 peptide 11
LQEHLKPYAVDLQDQINTQTQEMK

SEQ ID NO: 291 - protein, 9 aa, Artificial Sequence
  Description of Artificial Sequence: Apolipoprotein A4 peptide 12
LQLTPYIQR

SEQ ID NO: 292 - protein, 18 aa, Artificial Sequence
  Description of Artificial Sequence: Apolipoprotein A4 peptide 13
LVPFVVQLSGHLAQETER

SEQ ID NO: 293 - protein, 19 aa, Artificial Sequence
  Description of Artificial Sequence: Apolipoprotein A4 peptide 14
  MOD_RES (19)..(19): Methionin oxidation
MMPHANKVTQTFGENMQKM

SEQ ID NO: 294 - protein, 12 aa, Artificial Sequence
  Description of Artificial Sequence: Apolipoprotein A4 peptide 15
NLAPLVEDVQSK

SEQ ID NO: 295 - protein, 12 aa, Artificial Sequence
  Description of Artificial Sequence: Apolipoprotein A4 peptide 16
NMEELKGHLTPR

SEQ ID NO: 296 - protein, 11 aa, Artificial Sequence
  Description of Artificial Sequence: Apolipoprotein A4 peptide 17
QLEQQVEEFRR

SEQ ID NO: 297 - protein, 19 aa, Artificial Sequence
  Description of Artificial Sequence: Apolipoprotein A4 peptide 18
QQLGPNSGEVESHLSFLEK

SEQ ID NO: 298 - protein, 12 aa, Artificial Sequence
  Description of Artificial Sequence: Apolipoprotein A4 peptide 19
SLAPLTVGVQEK

SEQ ID NO: 299 - protein, 25 aa, Artificial Sequence
  Description of Artificial Sequence: Apolipoprotein A4 peptide 20
SLAPLTVGVQEKLNHQMEGLAFQMK

SEQ ID NO: 300 - protein, 14 aa, Artificial Sequence
  Description of Artificial Sequence: Apolipoprotein A4 peptide 21
TDVTQQLSTLFQDK

SEQ ID NO: 301 - protein, 28 aa, Artificial Sequence
  Description of Artificial Sequence: Apolipoprotein A4 peptide 22
TDVTQQLSTLFQDKLGDASTYADGVHNK

SEQ ID NO: 302 - protein, 11 aa, Artificial Sequence
  Description of Artificial Sequence: Apolipoprotein A4 peptide 23
TVEPMGEMFNK

SEQ ID NO: 303 - protein, 10 aa, Artificial Sequence
  Description of Artificial Sequence: Apolipoprotein A4 peptide 24
VKGNTEGLQK

SEQ ID NO: 304 - protein, 10 aa, Artificial Sequence
  Description of Artificial Sequence: Apolipoprotein A4 peptide 25
VNSFMSTLEK

SEQ ID NO: 305 - protein, 15 aa, Artificial Sequence
  Description of Artificial Sequence: Apolipoprotein A-I peptide 1
AQSVIDKASETLTAQ

SEQ ID NO: 306 - protein, 9 aa, Artificial Sequence
  Description of Artificial Sequence: Apolipoprotein A-I peptide 2
ARPALEDLR

SEQ ID NO: 307 - protein, 11 aa, Artificial Sequence
  Description of Artificial Sequence: Apolipoprotein A-I peptide 3
DFANVYVDAVK

SEQ ID NO: 308 - protein, 14 aa, Artificial Sequence
  Description of Artificial Sequence: Apolipoprotein A-I peptide 4
DFWDNLEKETDWVR

SEQ ID NO: 309 - protein, 13 aa, Artificial Sequence
  Description of Artificial Sequence: Apolipoprotein A-I peptide 5
  MOD_RES (12)..(13): Methionin oxidation
HSLMPMLETLKMM

SEQ ID NO: 310 - protein, 16 aa, Artificial Sequence
  Description of Artificial Sequence: Apolipoprotein A-I peptide 6
LAELKSNPTLNEYHTR

SEQ ID NO: 311 - protein, 7 aa, Artificial Sequence
  Description of Artificial Sequence: Apolipoprotein A-I peptide
LQELQGR

SEQ ID NO: 312 - protein, 9 aa, Artificial Sequence
  Description of Artificial Sequence: Apolipoprotein A-I peptide 7
LSPVAEEFR

SEQ ID NO: 313 - protein, 11 aa, Artificial Sequence
  Description of Artificial Sequence: Apolipoprotein A-I peptide 8
LSPVAEEFRDR

SEQ ID NO: 314 - protein, 10 aa, Artificial Sequence
  Description of Artificial Sequence: Apolipoprotein A-I peptide 10
  MOD_RES (10)..(10): Methionin oxidation
MRTHVDSLRM

SEQ ID NO: 315 - protein, 12 aa, Artificial Sequence
  Description of Artificial Sequence: Apolipoprotein A-I peptide 11
  MOD_RES (12)..(12): Methionin oxidation
QEMNKDLEEVKM

SEQ ID NO: 316 - protein, 9 aa, Artificial Sequence
  Description of Artificial Sequence: Apolipoprotein A-I peptide 12
QKLQELQGR

SEQ ID NO: 317 - protein, 7 aa, Artificial Sequence
  Description of Artificial Sequence: Apolipoprotein A-I peptide 13
THVDSLR

SEQ ID NO: 318 - protein, 11 aa, Artificial Sequence
  Description of Artificial Sequence: Apolipoprotein A-I peptide 14
TQLAPHSEQMR

SEQ ID NO: 319 - protein, 18 aa, Artificial Sequence
  Description of Artificial Sequence: Apolipoprotein A-I peptide 15
  MOD_RES (18)..(18): Methionin oxidation
TQLAPHSEQMRESLAQRM

SEQ ID NO: 320 - protein, 15 aa, Artificial Sequence
  Description of Artificial Sequence: Apolipoprotein A-I peptide 16
VAPLGAELQESARQK

SEQ ID NO: 321 - protein, 13 aa, Artificial Sequence
  Description of Artificial Sequence: Apolipoprotein A-I peptide 17
VKDFANVYVDAVK

SEQ ID NO: 322 - protein, 10 aa, Artificial Sequence
  Description of Artificial Sequence: Apolipoprotein A-I peptide 18
VQPYLDEFQK

SEQ ID NO: 323 - protein, 11 aa, Artificial Sequence
  Description of Artificial Sequence: Apolipoprotein A-I peptide 19
VQPYLDEFQKK

SEQ ID NO: 324 - protein, 9 aa, Artificial Sequence
  Description of Artificial Sequence: Apolipoprotein A-I peptide 20
WKEDVELYR

SEQ ID NO: 325 - protein, 9 aa, Artificial Sequence
  Description of Artificial Sequence: Apolipoprotein E peptide 1
AQAFGDRIR

SEQ ID NO: 326 - protein, 9 aa, Artificial Sequence
  Description of Artificial Sequence: Apolipoprotein E peptide 2
EHMEEVRSK

SEQ ID NO: 327 - protein, 14 aa, Artificial Sequence
  Description of Artificial Sequence: Apolipoprotein E peptide 3
ELEEQLGPVAEETR

SEQ ID NO: 328 - protein, 16 aa, Artificial Sequence
  Description of Artificial Sequence: Apolipoprotein E peptide 4
ELEEQLGPVAEETRAR

SEQ ID NO: 329 - protein, 11 aa, Artificial Sequence
  Description of Artificial Sequence: Apolipoprotein E peptide 5
ERLGPLVEQGR

SEQ ID NO: 330 - protein, 11 aa, Artificial Sequence
  Description of Artificial Sequence: Apolipoprotein E peptide 6
GRLEEVGNQAR

SEQ ID NO: 331 - protein, 13 aa, Artificial Sequence
  Description of Artificial Sequence: Apolipoprotein E peptide 7
  MOD_RES (13)..(13): Methionin oxidation
GWFEPIVEDMHRM

SEQ ID NO: 332 - protein, 11 aa, Artificial Sequence
  Description of Artificial Sequence: Apolipoprotein E peptide 8
LGADMEDLRNR

SEQ ID NO: 333 - protein, 11 aa, Artificial Sequence
  Description of Artificial Sequence: Apolipoprotein E peptide 9
LGKEVQAAQAR

SEQ ID NO: 334 - protein, 11 aa, Artificial Sequence
  Description of Artificial Sequence: Apolipoprotein E peptide 10
LGPLVEQGRQR

SEQ ID NO: 335 - protein, 20 aa, Artificial Sequence
  Description of Artificial Sequence: Apolipoprotein E peptide 11
LGQYRNEVHTMLGQSTEEIR

SEQ ID NO: 336 - protein, 14 aa, Artificial Sequence
  Description of Artificial Sequence: Apolipoprotein E peptide 12
LKGWFEPIVEDMHR

SEQ ID NO: 337 - protein, 9 aa, Artificial Sequence
  Description of Artificial Sequence: Apolipoprotein E peptide 13
LQAEIFQAR

SEQ ID NO: 338 - protein, 9 aa, Artificial Sequence
  Description of Artificial Sequence: Apolipoprotein E peptide 14
MEEQTQQIR

SEQ ID NO: 339 - protein, 18 aa, Artificial Sequence
  Description of Artificial Sequence: Apolipoprotein E peptide 15
  MOD_RES (18)..(18): Methionin oxidation
NEVHTMLGQSTEEIRARM

SEQ ID NO: 340 - protein, 8 aa, Artificial Sequence
  Description of Artificial Sequence: Apolipoprotein E peptide 16
QWANLMEK

SEQ ID NO: 341 - protein, 11 aa, Artificial Sequence
  Description of Artificial Sequence: Apolipoprotein E peptide 17
SKMEEQTQQIR

SEQ ID NO: 342 - protein, 15 aa, Artificial Sequence
  Description of Artificial Sequence: Apolipoprotein E peptide 18
TANLGAGAAQPLRDR

SEQ ID NO: 343 - protein, 21 aa, Artificial Sequence
  Description of Artificial Sequence: Apolipoprotein H (beta-2 glycoprotein I ) peptide 1
  MOD_RES (21)..(21): Lys-carbamidomethyl oxidation-carbamidomethyl oxidation
ATFGCHETYKLDGPEEAECTK

SEQ ID NO: 344 - protein, 10 aa, Artificial Sequence
  Description of Artificial Sequence: Apolipoprotein H (beta-2 glycoprotein I ) peptide 2
  MOD_RES (10)..(10): Methionin oxidation
ATVLYQGMRM

SEQ ID NO: 345 - protein, 24 aa, Artificial Sequence
  Description of Artificial Sequence: Apolipoprotein H (beta-2 glycoprotein I ) peptide 3
  MOD_RES (24)..(24): Methionin oxidation-carbamidomethyl oxidation-carbamidomethyl oxidation
CLPHFAMIGNDTVMCTEQGNWTRM

SEQ ID NO: 346 - protein, 23 aa, Artificial Sequence
  Description of Artificial Sequence: Apolipoprotein H (beta-2 glycoprotein I ) peptide 4
  MOD_RES (23)..(23): Lys-carbamidomethyl oxidation
CPFPPRPENGYVNYPAKPVLLYK

SEQ ID NO: 347 - protein, 25 aa, Artificial Sequence
  Description of Artificial Sequence: Apolipoprotein H (beta-2 glycoprotein I ) peptide 5
  MOD_RES (25)..(25): Lys-carbamidomethyl oxidation
CPFPPRPENGYVNYPAKPVLLYKDK

SEQ ID NO: 348 - protein, 10 aa, Artificial Sequence
  Description of Artificial Sequence: Apolipoprotein H (beta-2 glycoprotein I ) peptide 6
  MOD_RES (10)..(10): Arg-carbamidomethyl oxidation-carbamidomethyl oxidation
CSYTVEAHCR

SEQ ID NO: 349 - protein, 20 aa, Artificial Sequence
  Description of Artificial Sequence: Apolipoprotein H (beta-2 glycoprotein I ) peptide 7
  MOD_RES (20)..(20): Lys-carbamidomethyl oxidation
DGTIEIPSCFKEHSSLAFWK

SEQ ID NO: 350 - protein, 15 aa, Artificial Sequence
  Description of Artificial Sequence: Apolipoprotein H (beta-2 glycoprotein I ) peptide 8
  MOD_RES (15)..(15): Arg-carbamidomethyl oxidation
FTCPLTGMWPINTLR

SEQ ID NO: 351 - protein, 10 aa, Artificial Sequence
  Description of Artificial Sequence: Apolipoprotein H (beta-2 glycoprotein I ) peptide 9
  MOD_RES (10)..(10): Lys-carbamidomethyl oxidation
ITCPPPPVPK

SEQ ID NO: 352 - protein, 10 aa, Artificial Sequence
  Description of Artificial Sequence: Apolipoprotein H (beta-2 glycoprotein I ) peptide 10
KATVLYQGMR

SEQ ID NO: 353 - protein, 11 aa, Artificial Sequence
  Description of Artificial Sequence: Apolipoprotein H (beta-2 glycoprotein I ) peptide 11
  MOD_RES (11)..(11): Arg-carbamidomethyl oxidation-carbamidomethyl oxidation
KCSYTVEAHCR

SEQ ID NO: 354 - protein, 16 aa, Artificial Sequence
  Description of Artificial Sequence: Apolipoprotein H (beta-2 glycoprotein I ) peptide 12
  MOD_RES (16)..(16): Arg-carbamidomethyl oxidation
RFTCPLTGMWPINTLR

SEQ ID NO: 355 - protein, 11 aa, Artificial Sequence
  Description of Artificial Sequence: Apolipoprotein H (beta-2 glycoprotein I ) peptide 13
  MOD_RES (11)..(11): Arg-carbamidomethyl oxidation
TGTWSFLPTCR

SEQ ID NO: 356 - protein, 20 aa, Artificial Sequence
  Description of Artificial Sequence: Apolipoprotein H (beta-2 glycoprotein I ) peptide 14
  MOD_RES (20)..(20): Arg-carbamidomethyl oxidation
TSYDPGEQIVYSCKPGYVSR

SEQ ID NO: 357 - protein, 14 aa, Artificial Sequence
  Description of Artificial Sequence: Apolipoprotein H (beta-2 glycoprotein I ) peptide 15
  MOD_RES (14)..(14): Arg-carbamidomethyl oxidation
VCPFAGILENGIVR

SEQ ID NO: 358 - protein, 10 aa, Artificial Sequence
  Description of Artificial Sequence: Apolipoprotein H (beta-2 glycoprotein I ) peptide 16
  MOD_RES (10)..(10): Arg-carbamidomethyl oxidation
WSPDIPACAR

SEQ ID NO: 359 - protein, 15 aa, Artificial Sequence
  Description of Artificial Sequence: Apolipoprotein M peptide 1
  MOD_RES (15)..(15): Lys-carbamidomethyl oxidation-carbamidomethyl oxidation
CVEEFQSLTSCLDFK

SEQ ID NO: 360 - protein, 22 aa, Artificial Sequence
  Description of Artificial Sequence: Apolipoprotein M peptide 2
  MOD_RES (22)..(22): Arg-carbamidomethyl oxidation-carbamidomethyl oxidation
CVEEFQSLTSCLDFKAFLVTPR

SEQ ID NO: 361 - protein, 13 aa, Artificial Sequence
  Description of Artificial Sequence: Apolipoprotein M peptide 3
FLLYNRSPHPPEK

SEQ ID NO: 362 - protein, 11 aa, Artificial Sequence
  Description of Artificial Sequence: Apolipoprotein M peptide 4
LTEGKGNMELR

SEQ ID NO: 363 - protein, 9 aa, Artificial Sequence
  Description of Artificial Sequence: Apolipoprotein M peptide 5
QLQLRATIR

SEQ ID NO: 364 - protein, 22 aa, Artificial Sequence
  Description of Artificial Sequence: Apolipoprotein M peptide 6
  MOD_RES (22)..(22): Lys-carbamidomethyl oxidation-carbamidomethyl oxidation
SPHPPEKCVEEFQSLTSCLDFK

SEQ ID NO: 365 - protein, 16 aa, Artificial Sequence
  Description of Artificial Sequence: Apolipoprotein M peptide 7
  MOD_RES (15)..(15): Lys-carbamidomethyl oxidation
  MOD_RES (16)..(16): Methionin oxidation
TDLFSSSCPGGIMLKM

SEQ ID NO: 366 - protein, 23 aa, Artificial Sequence
  Description of Artificial Sequence: Apolipoprotein M peptide 8
  MOD_RES (23)..(23): Arg-carbamidomethyl oxidation
TDLFSSSCPGGIMLKETGQGYQR

SEQ ID NO: 367 - protein, 24 aa, Artificial Sequence
  Description of Artificial Sequence: Apolipoprotein M peptide 9
  MOD_RES (24)..(24): Methionin oxidation-carbamidomethyl oxidation
TEGRPDMKTDLFSSSCPGGIMLKM

SEQ ID NO: 368 - protein, 12 aa, Artificial Sequence
  Description of Artificial Sequence: Carboxylesterase precursor peptide 1
DAGVSTYMYEFR

SEQ ID NO: 369 - protein, 14 aa, Artificial Sequence
  Description of Artificial Sequence: Carboxylesterase precursor peptide 2
FAPPQPAEPWSFVK

SEQ ID NO: 370 - protein, 11 aa, Artificial Sequence
  Description of Artificial Sequence: Carboxylesterase precursor peptide 3
MNEETASLLLR

SEQ ID NO: 371 - protein, 12 aa, Artificial Sequence
  Description of Artificial Sequence: Carboxylesterase precursor peptide 4
  MOD_RES (12)..(12): Methionin oxidation
MNEETASLLLRM

SEQ ID NO: 372 - protein, 13 aa, Artificial Sequence
  Description of Artificial Sequence: Carboxylesterase precursor peptide 5
  MOD_RES (13)..(13): Methionin oxidation
MNEETASLLLRRM

SEQ ID NO: 373 - protein, 13 aa, Artificial Sequence
  Description of Artificial Sequence: Carboxylesterase precursor peptide 6
  MOD_RES (12)..(13): Methionin oxidation
MVMKFWANFARMM

SEQ ID NO: 374 - protein, 20 aa, Artificial Sequence
  Description of Artificial Sequence: Carboxylesterase precursor peptide 7
  MOD_RES (20)..(20): Methionin oxidation
RFHSELNISESMIPAVIEKM

SEQ ID NO: 375 - protein, 24 aa, Artificial Sequence
  Description of Artificial Sequence: Carboxylesterase precursor peptide 8
  MOD_RES (23)..(24): Methionin oxidation
SELILDMFGDIFFGIPAVLMSRMM

SEQ ID NO: 376 - protein, 13 aa, Artificial Sequence
  Description of Artificial Sequence: Carboxylesterase precursor peptide 9
SFNTVPYIVGFNK

SEQ ID NO: 377 - protein, 15 aa, Artificial Sequence
  Description of Artificial Sequence: Carboxylesterase precursor peptide 10
SLRDAGVSTYMYEFR

SEQ ID NO: 378 - protein, 32 aa, Artificial Sequence
  Description of Artificial Sequence: Carboxylesterase precursor peptide 11
VLGKYISLEGFEQPVAVFLGVPFAKPPLGSLR

SEQ ID NO: 379 - protein, 28 aa, Artificial Sequence
  Description of Artificial Sequence: Carboxylesterase precursor peptide 12
YISLEGFEQPVAVFLGVPFAKPPLGSLR

SEQ ID NO: 380 - protein, 9 aa, Artificial Sequence
  Description of Artificial Sequence: Carboxylesterase precursor peptide 13
YRPSFVSDK

SEQ ID NO: 381 - protein, 12 aa, Artificial Sequence
  Description of Artificial Sequence: Clusterin (Apolipoprotein J) peptide 1
ASGIIDTLFQDR

SEQ ID NO: 382 - protein, 16 aa, Artificial Sequence
  Description of Artificial Sequence: Clusterin (Apolipoprotein J) peptide 2
ASGIIDTLFQDRFFAR

SEQ ID NO: 383 - protein, 16 aa, Artificial Sequence
  Description of Artificial Sequence: Clusterin (Apolipoprotein J) peptide 3
ELHDPHYFSPIGFPHK

SEQ ID NO: 384 - protein, 24 aa, Artificial Sequence
  Description of Artificial Sequence: Clusterin (Apolipoprotein J) peptide 4
ELHDPHYFSPIGFPHKRPHFLYPK

SEQ ID NO: 385 - protein, 10 aa, Artificial Sequence
  Description of Artificial Sequence: Clusterin (Apolipoprotein J) peptide 5
  MOD_RES (9)..(9): Arg-carbamidomethyl oxidation
  MOD_RES (10)..(10): Methionin oxidation
HTCMKFYARM

SEQ ID NO: 386 - protein, 16 aa, Artificial Sequence
  Description of Artificial Sequence: Clusterin (Apolipoprotein J) peptide 6
  MOD_RES (16)..(16): Methionin oxidation
QQSQVLDAMQDSFARM

SEQ ID NO: 387 - protein, 8 aa, Artificial Sequence
  Description of Artificial Sequence: Clusterin (Apolipoprotein J) peptide 7
RPHFLYPK

SEQ ID NO: 388 - protein, 11 aa, Artificial Sequence
  Description of Artificial Sequence: Clusterin (Apolipoprotein J) peptide 8
SLLNSLEEAKK

SEQ ID NO: 389 - protein, 10 aa, Artificial Sequence
  Description of Artificial Sequence: Clusterin (Apolipoprotein J) peptide 9
TLIEKTNAER

SEQ ID NO: 390 - protein, 14 aa, Artificial Sequence
  Description of Artificial Sequence: Clusterin (Apolipoprotein J) peptide 10
YINKEIQNAVQGVK

SEQ ID NO: 391 - protein, 14 aa, Artificial Sequence
  Description of Artificial Sequence: Coagulation factor II (prothrombin) peptide 1
  MOD_RES (14)..(14): Arg-carbamidomethyl oxidation
DNLSPPLGQCLTER

SEQ ID NO: 392 - protein, 15 aa, Artificial Sequence
  Description of Artificial Sequence: Coagulation factor II (prothrombin) peptide 2
DTTEKELLDSYIDGR

SEQ ID NO: 393 - protein, 13 aa, Artificial Sequence
  Description of Artificial Sequence: Coagulation factor II (prothrombin) peptide 3
  MOD_RES (13)..(13): Arg-carbamidomethyl oxidation-carbamidomethyl oxidation
EECSVPVCGQEGR

SEQ ID NO: 394 - protein, 11 aa, Artificial Sequence
  Description of Artificial Sequence: Coagulation factor II (prothrombin) peptide 4
ENLDRDIALLK

SEQ ID NO: 395 - protein, 10 aa, Artificial Sequence
  Description of Artificial Sequence: Coagulation factor II (prothrombin) peptide 5
  MOD_RES (10)..(10): Arg-carbamidomethyl oxidation
ETFMDCLEGR

SEQ ID NO: 396 - protein, 11 aa, Artificial Sequence
  Description of Artificial Sequence: Coagulation factor II (prothrombin) peptide 6
  MOD_RES (11)..(11): Methionin oxidation-carbamidomethyl oxidation
ETFMDCLEGRM

SEQ ID NO: 397 - protein, 11 aa, Artificial Sequence
  Description of Artificial Sequence: Coagulation factor II (prothrombin) peptide 7
GIAPWQVMLFR

SEQ ID NO: 398 - protein, 13 aa, Artificial Sequence
  Description of Artificial Sequence: Coagulation factor II (prothrombin) peptide 8
  MOD_RES (13)..(13): Methionin oxidation
GIAPWQVMLFRKM

SEQ ID NO: 399 - protein, 11 aa, Artificial Sequence
  Description of Artificial Sequence: Coagulation factor II (prothrombin) peptide 9
GKYGFYTHVFR

SEQ ID NO: 400 - protein, 13 aa, Artificial Sequence
  Description of Artificial Sequence: Coagulation factor II (prothrombin) peptide 10
  MOD_RES (13)..(13): Lys-carbamidomethyl oxidation
IRITDNMFCAGFK

SEQ ID NO: 401 - protein, 11 aa, Artificial Sequence
  Description of Artificial Sequence: Coagulation factor II (prothrombin) peptide 11
  MOD_RES (11)..(11): Lys-carbamidomethyl oxidation
ITDNMFCAGFK

SEQ ID NO: 402 - protein, 25 aa, Artificial Sequence
  Description of Artificial Sequence: Coagulation factor II (prothrombin) peptide 12
  MOD_RES (25)..(25): Arg-carbamidomethyl oxidation
KPVPFSDYIHPVCLPDKQTVTSLLR

SEQ ID NO: 403 - protein, 24 aa, Artificial Sequence
  Description of Artificial Sequence: Coagulation factor II (prothrombin) peptide 13
  MOD_RES (24)..(24): Lys-carbamidomethyl oxidation
LYQGNLAVTTLGSPCLPWNSLPAK

SEQ ID NO: 404 - protein, 19 aa, Artificial Sequence
  Description of Artificial Sequence: Coagulation factor II (prothrombin) peptide 14
  MOD_RES (19)..(19): Arg-carbamidomethyl oxidation
NPDSSTTGPWCYTTDPTVR

SEQ ID NO: 405 - protein, 14 aa, Artificial Sequence
  Description of Artificial Sequence: Coagulation factor II (prothrombin) peptide 15
  MOD_RES (14)..(14): Arg-carbamidomethyl oxidation-carbamidomethyl oxidation
REECSVPVCGQEGR

SEQ ID NO: 406 - protein, 16 aa, Artificial Sequence
  Description of Artificial Sequence: Coagulation factor II (prothrombin) peptide 16
  MOD_RES (16)..(16): Lys-carbamidomethyl oxidation
RGDACEGDSGGPFVMK

SEQ ID NO: 407 - protein, 19 aa, Artificial Sequence
  Description of Artificial Sequence: Coagulation factor II (prothrombin) peptide 17
  MOD_RES (19)..(19): Arg-carbamidomethyl oxidation
SGGSKDNLSPPLGQCLTER

SEQ ID NO: 408 - protein, 15 aa, Artificial Sequence
  Description of Artificial Sequence: Coagulation factor II (prothrombin) peptide 18
  MOD_RES (15)..(15): Arg-carbamidomethyl oxidation
SPQELLCGASLISDR

SEQ ID NO: 409 - protein, 17 aa, Artificial Sequence
  Description of Artificial Sequence: Coagulation factor II (prothrombin) peptide 19
  MOD_RES (17)..(17): Lys-carbamidomethyl oxidation
TFGLGEADCGLRPLFEK

SEQ ID NO: 410 - protein, 13 aa, Artificial Sequence
  Description of Artificial Sequence: Coagulation factor II (prothrombin) peptide 20
TLSKYQDFDPEVK

SEQ ID NO: 411 - protein, 13 aa, Artificial Sequence
  Description of Artificial Sequence: Coagulation factor II (prothrombin) peptide 21
TTDAEFHTFFNEK

SEQ ID NO: 412 - protein, 16 aa, Artificial Sequence
  Description of Artificial Sequence: Coagulation factor II (prothrombin) peptide 22
  MOD_RES (16)..(16): Lys-carbamidomethyl oxidation
WYQMGIVSWGEGCDRK

SEQ ID NO: 413 - protein, 9 aa, Artificial Sequence
  Description of Artificial Sequence: Coagulation factor II (prothrombin) peptide 23
YNWRENLDR

SEQ ID NO: 414 - protein, 11 aa, Artificial Sequence
  Description of Artificial Sequence: Coagulation factor II (prothrombin) peptide 24
  MOD_RES (11)..(11): Arg-carbamidomethyl oxidation
YTVCDSVRKPR

SEQ ID NO: 415 - protein, 8 aa, Artificial Sequence
  Description of Artificial Sequence: Coagulation factor XIII, beta subunit peptide 1
  MOD_RES (8)..(8): Lys-carbamidomethyl oxidation
CNEYYLLK

SEQ ID NO: 416 - protein, 14 aa, Artificial Sequence
  Description of Artificial Sequence: Coagulation factor XIII, beta subunit peptide 2
  MOD_RES (14)..(14): Arg-carbamidomethyl oxidation
CNEYYLLKGSETSR

SEQ ID NO: 417 - protein, 11 aa, Artificial Sequence
  Description of Artificial Sequence: Coagulation factor XIII, beta subunit peptide 3
  MOD_RES (11)..(11): Arg-carbamidomethyl oxidation
CTAEGWSPNPR

SEQ ID NO: 418 - protein, 15 aa, Artificial Sequence
  Description of Artificial Sequence: Coagulation factor XIII, beta subunit peptide 4
DAYISETSIAGSVLR

SEQ ID NO: 419 - protein, 17 aa, Artificial Sequence
  Description of Artificial Sequence: Coagulation factor XIII, beta subunit peptide 5
  MOD_RES (17)..(17): Lys-carbamidomethyl oxidation
DIVAYTCTAGYYTTTGK

SEQ ID NO: 420 - protein, 10 aa, Artificial Sequence
  Description of Artificial Sequence: Coagulation factor XIII, beta subunit peptide 6
  MOD_RES (10)..(10): Arg-carbamidomethyl oxidation
GDVRYPMCIR

SEQ ID NO: 421 - protein, 10 aa, Artificial Sequence
  Description of Artificial Sequence: Coagulation factor XIII, beta subunit peptide 7
  MOD_RES (10)..(10): Arg-carbamidomethyl oxidation
GMCASPPVIR

SEQ ID NO: 422 - protein, 9 aa, Artificial Sequence
  Description of Artificial Sequence: Coagulation factor XIII, beta subunit peptide 8
IAQYYYTFK

SEQ ID NO: 423 - protein, 12 aa, Artificial Sequence
  Description of Artificial Sequence: Coagulation factor XIII, beta subunit peptide 9
  MOD_RES (12)..(12): Lys-carbamidomethyl oxidation
ILHGDLIDFVCK

SEQ ID NO: 424 - protein, 11 aa, Artificial Sequence
  Description of Artificial Sequence: Coagulation factor XIII, beta subunit peptide 10
LIENGYFHPVK

SEQ ID NO: 425 - protein, 21 aa, Artificial Sequence
  Description of Artificial Sequence: Coagulation factor XIII, beta subunit peptide 11
  MOD_RES (21)..(21): Arg-carbamidomethyl oxidation
LSFFCLAGYATESGKQEEQIR

SEQ ID NO: 426 - protein, 11 aa, Artificial Sequence
  Description of Artificial Sequence: Coagulation factor XIII, beta subunit peptide 12
  MOD_RES (11)..(11): Arg-carbamidomethyl oxidation
QCDFPTVENGR

SEQ ID NO: 427 - protein, 20 aa, Artificial Sequence
  Description of Artificial Sequence: Coagulation factor XIII, beta subunit peptide 13
  MOD_RES (20)..(20): Arg-carbamidomethyl oxidation
QGYNLSPSIPLSEISAQCNR

SEQ ID NO: 428 - protein, 20 aa, Artificial Sequence
  Description of Artificial Sequence: Coagulation factor XIII, beta subunit peptide 14
  MOD_RES (20)..(20): Lys-carbamidomethyl oxidation-carbamidomethyl oxidation
QTGEAECQANGWSLTPQCNK

SEQ ID NO: 429 - protein, 16 aa, Artificial Sequence
  Description of Artificial Sequence: Coagulation factor XIII, beta subunit peptide 15
RDAYISETSIAGSVLR

SEQ ID NO: 430 - protein, 10 aa, Artificial Sequence
  Description of Artificial Sequence: Coagulation factor XIII, beta subunit peptide 16
SFYFPMSVDK

SEQ ID NO: 431 - protein, 12 aa, Artificial Sequence
  Description of Artificial Sequence: Coagulation factor XIII, beta subunit peptide 17
  MOD_RES (12)..(12): Methionin oxidation
SFYFPMSVDKKM

SEQ ID NO: 432 - protein, 24 aa, Artificial Sequence
  Description of Artificial Sequence: Coagulation factor XIII, beta subunit peptide 18
  MOD_RES (24)..(24): Arg-carbamidomethyl oxidation-carbamidomethyl oxidation
TTGGKDEEVVHCLSAGWSSQPSCR

SEQ ID NO: 433 - protein, 19 aa, Artificial Sequence
  Description of Artificial Sequence: Coagulation factor XIII, beta subunit peptide 18
  MOD_RES (19)..(19): Lys-carbamidomethyl oxidation
VKDIVAYTCTAGYYTTTGK

SEQ ID NO: 434 - protein, 16 aa, Artificial Sequence
  Description of Artificial Sequence: Complememnt histocompatibility 2, complement component factor B peptide 1
AEGIPEFYDYDVALVK

SEQ ID NO: 435 - protein, 10 aa, Artificial Sequence
  Description of Artificial Sequence: Complememnt histocompatibility 2, complement component factor B peptide 2
ALLDIGRDPK

SEQ ID NO: 436 - protein, 11 aa, Artificial Sequence
  Description of Artificial Sequence: Complememnt histocompatibility 2, complement component factor B peptide 3
  MOD_RES (11)..(11): Lys-carbamidomethyl oxidation
ALRLPQTATCK

SEQ ID NO: 437 - protein, 17 aa, Artificial Sequence
  Description of Artificial Sequence: Complememnt histocompatibility 2, complement component factor B peptide 4
  MOD_RES (17)..(17): Arg-carbamidomethyl oxidation
CLTNLIEKVASYGVRPR

SEQ ID NO: 438 - protein, 15 aa, Artificial Sequence
  Description of Artificial Sequence: Complememnt histocompatibility 2, complement component factor B peptide 5
  MOD_RES (15)..(15): Arg-carbamidomethyl oxidation
CPRPQDFENGEFWPR

SEQ ID NO: 439 - protein, 12 aa, Artificial Sequence
  Description of Artificial Sequence: Complememnt histocompatibility 2, complement component factor B peptide 6
DVKALFVSEQGK

SEQ ID NO: 440 - protein, 16 aa, Artificial Sequence
  Description of Artificial Sequence: Complememnt histocompatibility 2, complement component factor B peptide 7
  MOD_RES (16)..(16): Arg-carbamidomethyl oxidation
FIQVGVISWGVVDVCR

SEQ ID NO: 441 - protein, 12 aa, Artificial Sequence
  Description of Artificial Sequence: Complememnt histocompatibility 2, complement component factor B peptide 8
GDSGGPLIVHKR

SEQ ID NO: 442 - protein, 29 aa, Artificial Sequence
  Description of Artificial Sequence: Complememnt histocompatibility 2, complement component factor B peptide 9
  MOD_RES (29)..(29): Arg-carbamidomethyl oxidation
GGSFQLLQGGQALEYLCPSGFYPYPVQTR

SEQ ID NO: 443 - protein, 12 aa, Artificial Sequence
  Description of Artificial Sequence: Complememnt histocompatibility 2, complement component factor B peptide 10
GNDYHKQPWQAK

SEQ ID NO: 444 - protein, 26 aa, Artificial Sequence
  Description of Artificial Sequence: Complememnt histocompatibility 2, complement component factor B peptide 11
  MOD_RES (26)..(26): Methionin oxidation
HVIIIMTDGLHNMGGNPVTVIQDIRM

SEQ ID NO: 445 - protein, 9 aa, Artificial Sequence
  Description of Artificial Sequence: Complememnt histocompatibility 2, complement component factor B peptide 12
KDNEHHVFK

SEQ ID NO: 446 - protein, 11 aa, Artificial Sequence
  Description of Artificial Sequence: Complememnt histocompatibility 2, complement component factor B peptide 13
  MOD_RES (11)..(11): Arg-carbamidomethyl oxidation
LEDIVTYHCSR

SEQ ID NO: 447 - protein, 20 aa, Artificial Sequence
  Description of Artificial Sequence: Complememnt histocompatibility 2, complement component factor B peptide 14
  MOD_RES (20)..(20): Arg-carbamidomethyl oxidation-carbamidomethyl oxidation
LKYGQTLRPICLPCTEGTTR

SEQ ID NO: 448 - protein, 12 aa, Artificial Sequence
  Description of Artificial Sequence: Complememnt histocompatibility 2, complement component factor B peptide 15
LNQISYEDHKLK

SEQ ID NO: 449 - protein, 29 aa, Artificial Sequence
  Description of Artificial Sequence: Complememnt histocompatibility 2, complement component factor B peptide 16
NPREDYLDVYVFGVGPLVDSVNINALASK

SEQ ID NO: 450 - protein, 10 aa, Artificial Sequence
  Description of Artificial Sequence: Complememnt histocompatibility 2, complement component factor B peptide 17
QHKEQLLPVK

SEQ ID NO: 451 - protein, 9 aa, Artificial Sequence
  Description of Artificial Sequence: Complememnt histocompatibility 2, complement component factor B peptide 18
QQLVPSYAR

SEQ ID NO: 452 - protein, 13 aa, Artificial Sequence
  Description of Artificial Sequence: Complememnt histocompatibility 2, complement component factor B peptide 19
RDLEIEEVLFHPK

SEQ ID NO: 453 - protein, 10 aa, Artificial Sequence
  Description of Artificial Sequence: Complememnt histocompatibility 2, complement component factor B peptide 20
RQQLVPSYAR

SEQ ID NO: 454 - protein, 12 aa, Artificial Sequence
  Description of Artificial Sequence: Complememnt histocompatibility 2, complement component factor B peptide 21
  MOD_RES (12)..(12): Lys-carbamidomethyl oxidation
SLSLCGMVWEHK

SEQ ID NO: 455 - protein, 13 aa, Artificial Sequence
  Description of Artificial Sequence: Complememnt histocompatibility 2, complement component factor B peptide 22
  MOD_RES (13)..(13): Lys-carbamidomethyl oxidation
SLSLCGMVWEHKK

SEQ ID NO: 456 - protein, 18 aa, Artificial Sequence
  Description of Artificial Sequence: Complememnt histocompatibility 2, complement component factor B peptide 23
  MOD_RES (18)..(18): Arg-carbamidomethyl oxidation
SRFIQVGVISWGVVDVCR

SEQ ID NO: 457 - protein, 11 aa, Artificial Sequence
  Description of Artificial Sequence: Complememnt histocompatibility 2, complement component factor B peptide 24
STGSWSDLQTR

SEQ ID NO: 458 - protein, 11 aa, Artificial Sequence
  Description of Artificial Sequence: Complememnt histocompatibility 2, complement component factor B peptide 25
VKDASEVVTPR

SEQ ID NO: 459 - protein, 21 aa, Artificial Sequence
  Description of Artificial Sequence: Complememnt histocompatibility 2, complement component factor B peptide 26
  MOD_RES (20)..(21): Methionin oxidation
VKDMEDLENVFYQMIDETKMM

SEQ ID NO: 460 - protein, 15 aa, Artificial Sequence
  Description of Artificial Sequence: Complememnt histocompatibility 2, complement component factor B peptide 27
VSDERSSDADWVTEK

SEQ ID NO: 461 - protein, 25 aa, Artificial Sequence
  Description of Artificial Sequence: Complememnt histocompatibility 2, complement component factor B peptide 28
  MOD_RES (25)..(25): Arg-carbamidomethyl oxidation-carbamidomethyl oxidation
WDGQTAICDDGAGYCPNPGIPIGTR

SEQ ID NO: 462 - protein, 11 aa, Artificial Sequence
  Description of Artificial Sequence: Complememnt histocompatibility 2, complement component factor B peptide 29
YGLLTYATVPK

SEQ ID NO: 463 - protein, 18 aa, Artificial Sequence
  Description of Artificial Sequence: Complememnt histocompatibility 2, complement component factor B peptide 30
  MOD_RES (18)..(18): Arg-carbamidomethyl oxidation-carbamidomethyl oxidation
YGQTLRPICLPCTEGTTR

SEQ ID NO: 464 - protein, 14 aa, Artificial Sequence
  Description of Artificial Sequence: Complement C3 precursor (HSE-MSF) peptide 1
AAVFNHFISDGVKK

SEQ ID NO: 465 - protein, 8 aa, Artificial Sequence
  Description of Artificial Sequence: Complement C3 precursor (HSE-MSF) peptide 2
AFYEHAPK

SEQ ID NO: 466 - protein, 18 aa, Artificial Sequence
  Description of Artificial Sequence: Complement C3 precursor (HSE-MSF) peptide 3
  MOD_RES (18)..(18): Methionin oxidation
AVMVSFQSGYLFIQTDKM

SEQ ID NO: 467 - skipped

SEQ ID NO: 468 - protein, 13 aa, Artificial Sequence
  Description of Artificial Sequence: Complement C3 precursor (HSE-MSF) peptide 5
DNHLAPGQQTTLR

SEQ ID NO: 469 - protein, 21 aa, Artificial Sequence
  Description of Artificial Sequence: Complement C3 precursor (HSE-MSF) peptide 6
DNHLAPGQQTTLRIEGNQGAR

SEQ ID NO: 470 - protein, 14 aa, Artificial Sequence
  Description of Artificial Sequence: Complement C3 precursor (HSE-MSF) peptide 7
  MOD_RES (14)..(14): Arg-carbamidomethyl oxidation
DSCIGTLVVKGDPR

SEQ ID NO: 471 - protein, 22 aa, Artificial Sequence
  Description of Artificial Sequence: Complement C3 precursor (HSE-MSF) peptide 8
EPGQDLVVLSLPITPEFIPSFR

SEQ ID NO: 472 - protein, 22 aa, Artificial Sequence
  Description of Artificial Sequence: Complement C3 precursor (HSE-MSF) peptide 9
  MOD_RES (22)..(22): Lys-carbamidomethyl oxidation
EVVADSVWVDVKDSCIGTLVVK

SEQ ID NO: 473 - protein, 26 aa, Artificial Sequence
  Description of Artificial Sequence: Complement C3 precursor (HSE-MSF) peptide 10
  MOD_RES (25)..(26): Methionin oxidation
FFKPAMPFDLMVFVTNPDGSPASKMM

SEQ ID NO: 474 - protein, 17 aa, Artificial Sequence
  Description of Artificial Sequence: Complement C3 precursor (HSE-MSF) peptide 11
GDPRDNHLAPGQQTTLR

SEQ ID NO: 475 - protein, 8 aa, Artificial Sequence
  Description of Artificial Sequence: Complement C3 precursor (HSE-MSF) peptide 12
IEGNQGAR

SEQ ID NO: 476 - protein, 13 aa, Artificial Sequence
  Description of Artificial Sequence: Complement C3 precursor (HSE-MSF) peptide 13
IFTVDNNLLPVGK

SEQ ID NO: 477 - protein, 10 aa, Artificial Sequence
  Description of Artificial Sequence: Complement C3 precursor (HSE-MSF) peptide 14
IRAFYEHAPK

SEQ ID NO: 478 - protein, 12 aa, Artificial Sequence
  Description of Artificial Sequence: Complement C3 precursor (HSE-MSF) peptide 15
  MOD_RES (12)..(12): Methionin oxidation
IRYYTYLVMNKM

SEQ ID NO: 479 - protein, 9 aa, Artificial Sequence
  Description of Artificial Sequence: Complement C3 precursor (HSE-MSF) peptide 16
ISLAHSLTR

SEQ ID NO: 480 - protein, 18 aa, Artificial Sequence
  Description of Artificial Sequence: Complement C3 precursor (HSE-MSF) peptide 17
KVLMEGVRPSNADALVGK

SEQ ID NO: 481 - protein, 30 aa, Artificial Sequence
  Description of Artificial Sequence: Complement C3 precursor (HSE-MSF) peptide 18
LESEETIVLEAHDAQGDIPVTVTVQDFLKR

SEQ ID NO: 482 - protein, 9 aa, Artificial Sequence
  Description of Artificial Sequence: Complement C3 precursor (HSE-MSF) peptide 19
LSINTPNSR

SEQ ID NO: 483 - protein, 14 aa, Artificial Sequence
  Description of Artificial Sequence: Complement C3 precursor (HSE-MSF) peptide 20
LVAYYTLIGASGQR

SEQ ID NO: 484 - protein, 17 aa, Artificial Sequence
  Description of Artificial Sequence: Complement C3 precursor (HSE-MSF) peptide 21
  MOD_RES (17)..(17): Methionin oxidation
MELKPGDNLNVNFHLRM

SEQ ID NO: 485 - protein, 18 aa, Artificial Sequence
  Description of Artificial Sequence: Complement C3 precursor (HSE-MSF) peptide 22
NVDGTAFVIFGVQDGDKK

SEQ ID NO: 486 - protein, 14 aa, Artificial Sequence
  Description of Artificial Sequence: Complement C3 precursor (HSE-MSF) peptide 23
NYAGVFMDAGLAFK

SEQ ID NO: 487 - protein, 10 aa, Artificial Sequence
  Description of Artificial Sequence: Complement C3 precursor (HSE-MSF) peptide 24
QIFSAEFEVK

SEQ ID NO: 488 - protein, 8 aa, Artificial Sequence
  Description of Artificial Sequence: Complement C3 precursor (HSE-MSF) peptide 25
QPLTITVR

SEQ ID NO: 489 - protein, 18 aa, Artificial Sequence
  Description of Artificial Sequence: Complement C3 precursor (HSE-MSF) peptide 26
QVLTSEKTVLTGASGHLR

SEQ ID NO: 490 - protein, 16 aa, Artificial Sequence
  Description of Artificial Sequence: Complement C3 precursor (HSE-MSF) peptide 27
SGIPIVTSPYQIHFTK

SEQ ID NO: 491 - protein, 22 aa, Artificial Sequence
  Description of Artificial Sequence: Complement C3 precursor (HSE-MSF) peptide 28
  MOD_RES (22)..(22): Methionin oxidation
SLYVSVTVILHSGSDMVEAERM

SEQ ID NO: 492 - protein, 12 aa, Artificial Sequence
  Description of Artificial Sequence: Complement C3 precursor (HSE-MSF) peptide 29
TIYTPGSTVLYR

SEQ ID NO: 493 - protein, 25 aa, Artificial Sequence
  Description of Artificial Sequence: Complement C3 precursor (HSE-MSF) peptide 30
  MOD_RES (24)..(25): Methionin oxidation
TMEAHPYSTMHNSNNYLHLSVSRMM

SEQ ID NO: 494 - protein, 10 aa, Artificial Sequence
  Description of Artificial Sequence: Complement C3 precursor (HSE-MSF) peptide 31
TSQGLQTEQR

SEQ ID NO: 495 - protein, 11 aa, Artificial Sequence
  Description of Artificial Sequence: Complement C3 precursor (HSE-MSF) peptide 32
TVLTGASGHLR

SEQ ID NO: 496 - protein, 16 aa, Artificial Sequence
  Description of Artificial Sequence: Complement C3 precursor (HSE-MSF) peptide 33
TVVILIETPDGIPVKR

SEQ ID NO: 497 - protein, 23 aa, Artificial Sequence
  Description of Artificial Sequence: Complement C3 precursor (HSE-MSF) peptide 34
VEPTETFYYIDDPNGLEVSIIAK

SEQ ID NO: 498 - protein, 15 aa, Artificial Sequence
  Description of Artificial Sequence: Complement C3 precursor (HSE-MSF) peptide 35
VGLVAVDKGVFVLNK

SEQ ID NO: 499 - protein, 17 aa, Artificial Sequence
  Description of Artificial Sequence: Complement C3 precursor (HSE-MSF) peptide 36
VLMEGVRPSNADALVGK

SEQ ID NO: 500 - protein, 14 aa, Artificial Sequence
  Description of Artificial Sequence: Complement C3 precursor (HSE-MSF) peptide 37
VVIEDGVGDAVLTR

SEQ ID NO: 501 - protein, 15 aa, Artificial Sequence
  Description of Artificial Sequence: Complement C3 precursor (HSE-MSF) peptide 38
VVIEDGVGDAVLTRK

SEQ ID NO: 502 - protein, 15 aa, Artificial Sequence
  Description of Artificial Sequence: Complement C3 precursor (HSE-MSF) peptide 39
YVTVVANFGETVVEK

SEQ ID NO: 503 - protein, 9 aa, Artificial Sequence
  Description of Artificial Sequence: Complement C3 precursor (HSE-MSF) peptide 40
YYTYLVMNK

SEQ ID NO: 504 - protein, 14 aa, Artificial Sequence
  Description of Artificial Sequence: Complement C4 peptide 1
APHIQLVAQSPWLR

SEQ ID NO: 505 - protein, 14 aa, Artificial Sequence
  Description of Artificial Sequence: Complement C4 peptide 2
ATETQGVNLLFSSR

SEQ ID NO: 506 - protein, 15 aa, Artificial Sequence
  Description of Artificial Sequence: Complement C4 peptide 3
ATETQGVNLLFSSRR

SEQ ID NO: 507 - protein, 10 aa, Artificial Sequence
  Description of Artificial Sequence: Complement C4 peptide 4
FALMDEQGKR

SEQ ID NO: 508 - protein, 12 aa, Artificial Sequence
  Description of Artificial Sequence: Complement C4 peptide 5
FVSSAFSLDLSR

SEQ ID NO: 509 - protein, 17 aa, Artificial Sequence
  Description of Artificial Sequence: Complement C4 peptide 6
GHIFVQTDQPIYNPGQR

SEQ ID NO: 510 - protein, 12 aa, Artificial Sequence
  Description of Artificial Sequence: Complement C4 peptide 7
GLETQAKLVEGR

SEQ ID NO: 511 - protein, 13 aa, Artificial Sequence
  Description of Artificial Sequence: Complement C4 peptide 8
GTGFLSIEPLDPR

SEQ ID NO: 512 - protein, 29 aa, Artificial Sequence
  Description of Artificial Sequence: Complement C4 peptide 9
  MOD_RES (29)..(29): Methionin oxidation
HLVPGAHFLLQALVQEMSGSEASNVPVKM

SEQ ID NO: 513 - protein, 10 aa, Artificial Sequence
  Description of Artificial Sequence: Complement C4 peptide 10
KYVLPNFEVK

SEQ ID NO: 514 - protein, 31 aa, Artificial Sequence
  Description of Artificial Sequence: Complement C4 peptide 11
LLLFSPSVVNLGTPLSVGVQLLDAPPGQEVK

SEQ ID NO: 515 - protein, 14 aa, Artificial Sequence
  Description of Artificial Sequence: Complement C4 peptide 12
LLVSAGSLYPAIAR

SEQ ID NO: 516 - protein, 20 aa, Artificial Sequence
  Description of Artificial Sequence: Complement C4 peptide 13
LSSGDDFVLLSLEVPLEDVR

SEQ ID NO: 517 - protein, 22 aa, Artificial Sequence
  Description of Artificial Sequence: Complement C4 peptide 14
LTVQAPPSRGTGFLSIEPLDPR

SEQ ID NO: 518 - protein, 20 aa, Artificial Sequence
  Description of Artificial Sequence: Complement C4 peptide 15
  MOD_RES (20)..(20): Methionin oxidation
MRPSTDFLTITVENSHGLRM

SEQ ID NO: 519 - protein, 19 aa, Artificial Sequence
  Description of Artificial Sequence: Complement C4 peptide 16
NTAFKATETQGVNLLFSSR

SEQ ID NO: 520 - protein, 15 aa, Artificial Sequence
  Description of Artificial Sequence: Complement C4 peptide 17
RAPHIQLVAQSPWLR

SEQ ID NO: 521 - protein, 18 aa, Artificial Sequence
  Description of Artificial Sequence: Complement C4 peptide 18
RGHIFVQTDQPIYNPGQR

SEQ ID NO: 522 - protein, 9 aa, Artificial Sequence
  Description of Artificial Sequence: Complement C4 peptide 19
  MOD_RES (9)..(9): Arg-carbamidomethyl oxidation
SCGLFDLRR

SEQ ID NO: 523 - protein, 11 aa, Artificial Sequence
  Description of Artificial Sequence: Complement C4 peptide 20
TFLRGLETQAK

SEQ ID NO: 524 - protein, 14 aa, Artificial Sequence
  Description of Artificial Sequence: Complement C4 peptide 21
YIYGKPVQGVAYTR

SEQ ID NO: 525 - protein, 9 aa, Artificial Sequence
  Description of Artificial Sequence: Complement C4 peptide 22
YVLPNFEVK

SEQ ID NO: 526 - protein, 10 aa, Artificial Sequence
  Description of Artificial Sequence: Complement C4b-binding protein precursor peptide 1
ATYTHRDSVR

SEQ ID NO: 527 - protein, 17 aa, Artificial Sequence
  Description of Artificial Sequence: Complement C4b-binding protein precursor peptide 2
  MOD_RES (17)..(17): Lys-carbamidomethyl oxidation
GKGVAWSNPFPECVIVK

SEQ ID NO: 528 - protein, 23 aa, Artificial Sequence
  Description of Artificial Sequence: Complement C4b-binding protein precursor peptide 3
  MOD_RES (23)..(23): Arg-carbamidomethyl oxidation
HSGTEDFYPYNHGISYTCDPGFR

SEQ ID NO: 529 - protein, 18 aa, Artificial Sequence
  Description of Artificial Sequence: Complement C4b-binding protein precursor peptide 4
  MOD_RES (18)..(18): Lys-carbamidomethyl oxidation
IICSQPNILHGVIVSGYK

SEQ ID NO: 530 - protein, 24 aa, Artificial Sequence
  Description of Artificial Sequence: Complement C4b-binding protein precursor peptide 5
  MOD_RES (24)..(24): Arg-carbamidomethyl oxidation
IICSQPNILHGVIVSGYKATYTHR

SEQ ID NO: 531 - protein, 13 aa, Artificial Sequence
  Description of Artificial Sequence: Complement C4b-binding protein precursor peptide 6
  MOD_RES (13)..(13): Arg-carbamidomethyl oxidation
ITLVTYECDKGYR

SEQ ID NO: 532 - protein, 20 aa, Artificial Sequence
  Description of Artificial Sequence: Complement C4b-binding protein precursor peptide 7
  MOD_RES (20)..(20): Methionin oxidation-carbamidomethyl oxidation-carbamidomethyl oxidation
MMVYCKPSGEWEISVSCAKM

SEQ ID NO: 533 - protein, 13 aa, Artificial Sequence
  Description of Artificial Sequence: Complement C4b-binding protein precursor peptide 8
  MOD_RES (13)..(13): Methionin oxidation
TMQYVPNSHDVKM

SEQ ID NO: 534 - protein, 14 aa, Artificial Sequence
  Description of Artificial Sequence: Complement C4b-binding protein precursor peptide 9
  MOD_RES (14)..(14): Lys-carbamidomethyl oxidation
TVPVWSSSPPTCEK

SEQ ID NO: 535 - protein, 9 aa, Artificial Sequence
  Description of Artificial Sequence: Complement C4b-binding protein precursor peptide 10
  MOD_RES (9)..(9): Lys-carbamidomethyl oxidation
WKGTAPQCK

SEQ ID NO: 536 - protein, 9 aa, Artificial Sequence
  Description of Artificial Sequence: Complement C4b-binding protein precursor peptide 11
  MOD_RES (9)..(9): Arg-carbamidomethyl oxidation
YECLPGYGR

SEQ ID NO: 537 - protein, 16 aa, Artificial Sequence
  Description of Artificial Sequence: Complement component 6 peptide 1
ALVHLPLEYNSAVYSR

SEQ ID NO: 538 - protein, 12 aa, Artificial Sequence
  Description of Artificial Sequence: Complement component 6 peptide 2
ATDLQLSDVFLK

SEQ ID NO: 539 - protein, 16 aa, Artificial Sequence
  Description of Artificial Sequence: Complement component 6 peptide 3
  MOD_RES (16)..(16): Arg-carbamidomethyl oxidation-carbamidomethyl oxidation
CLPDRTWSQGDVECQR

SEQ ID NO: 540 - protein, 9 aa, Artificial Sequence
  Description of Artificial Sequence: Complement component 6 peptide 4
  MOD_RES (9)..(9): Arg-carbamidomethyl oxidation
ECNNPAPQR

SEQ ID NO: 541 - protein, 16 aa, Artificial Sequence
  Description of Artificial Sequence: Complement component 6 peptide 5
  MOD_RES (16)..(16): Arg-carbamidomethyl oxidation-carbamidomethyl oxidation- carbamidomethyl oxidation
FDPCQCAPCPNNGRPR

SEQ ID NO: 542 - protein, 12 aa, Artificial Sequence
  Description of Artificial Sequence: Complement component 6 peptide 6
FFPIPIFHFSEK

SEQ ID NO: 543 - protein, 12 aa, Artificial Sequence
  Description of Artificial Sequence: Complement component 6 peptide 7
  MOD_RES (12)..(12): Lys-carbamidomethyl oxidation-carbamidomethyl oxidation
FLCDSGRCIPSK

SEQ ID NO: 544 - protein, 14 aa, Artificial Sequence
  Description of Artificial Sequence: Complement component 6 peptide 8
  MOD_RES (14)..(14): Lys-carbamidomethyl oxidation
FLYMEIHKEDTCTK

SEQ ID NO: 545 - protein, 14 aa, Artificial Sequence
  Description of Artificial Sequence: Complement component 6 peptide 9
  MOD_RES (14)..(14): Lys-carbamidomethyl oxidation
GEVLDNSFTGGICK

SEQ ID NO: 546 - protein, 21 aa, Artificial Sequence
  Description of Artificial Sequence: Complement component 6 peptide 10
  MOD_RES (21)..(21): Arg-carbamidomethyl oxidation-carbamidomethyl oxidation- carbamidomethyl oxidation-carbamidomethyl oxidation
LSGTECLCVCQSGTYGENCER

SEQ ID NO: 547 - protein, 10 aa, Artificial Sequence
  Description of Artificial Sequence: Complement component 6 peptide 11
NEDSLSVDER

SEQ ID NO: 548 - protein, 12 aa, Artificial Sequence
  Description of Artificial Sequence: Complement component 6 peptide 12
NEHSHYSSAFNK

SEQ ID NO: 549 - protein, 15 aa, Artificial Sequence
  Description of Artificial Sequence: Complement component 6 peptide 13
NEHSHYSSAFNKVIK

SEQ ID NO: 550 - protein, 9 aa, Artificial Sequence
  Description of Artificial Sequence: Complement component 6 peptide 14
  MOD_RES (9)..(9): Arg-carbamidomethyl oxidation
NIPCAVTKR

SEQ ID NO: 551 - protein, 9 aa, Artificial Sequence
  Description of Artificial Sequence: Complement component 6 peptide 15
  MOD_RES (9)..(9): Arg-carbamidomethyl oxidation
NKFLCDSGR

SEQ ID NO: 552 - protein, 12 aa, Artificial Sequence
  Description of Artificial Sequence: Complement component 6 peptide 16
NKNEDSLSVDER

SEQ ID NO: 553 - protein, 22 aa, Artificial Sequence
  Description of Artificial Sequence: Complement component 6 peptide 17
  MOD_RES (22)..(22): Lys-carbamidomethyl oxidation
QELQNSGLTEEEAQNCVQYETK

SEQ ID NO: 554 - protein, 12 aa, Artificial Sequence
  Description of Artificial Sequence: Complement component 6 peptide 18
QRQVVVNDYYWK

SEQ ID NO: 555 - protein, 10 aa, Artificial Sequence
  Description of Artificial Sequence: Complement component 6 peptide 19
QVVVNDYYWK

SEQ ID NO: 556 - protein, 11 aa, Artificial Sequence
  Description of Artificial Sequence: Complement component 6 peptide 20
SQQAAALAWEK

SEQ ID NO: 557 - protein, 27 aa, Artificial Sequence
  Description of Artificial Sequence: Complement component 6 peptide 21
  MOD_RES (27)..(27): Lys-carbamidomethyl oxidation-carbamidomethyl oxidation
SVLRPSQFGGQPCTEPLVTFQPCVPSK

SEQ ID NO: 558 - protein, 14 aa, Artificial Sequence
  Description of Artificial Sequence: Complement component 6 peptide 22
TKFFPIPIFHFSEK

SEQ ID NO: 559 - protein, 11 aa, Artificial Sequence
  Description of Artificial Sequence: Complement component 6 peptide 23
  MOD_RES (11)..(11): Arg-carbamidomethyl oxidation
TRECNNPAPQR

SEQ ID NO: 560 - protein, 19 aa, Artificial Sequence
  Description of Artificial Sequence: Complement component 6 peptide 24
  MOD_RES (19)..(19): Arg-carbamidomethyl oxidation
TSCLKPVVQDVLTISPFQR

SEQ ID NO: 561 - protein, 11 aa, Artificial Sequence
  Description of Artificial Sequence: Complement component 6 peptide 25
  MOD_RES (11)..(11): Arg-carbamidomethyl oxidation
TWSQGDVECQR

SEQ ID NO: 562 - protein, 14 aa, Artificial Sequence
  Description of Artificial Sequence: Complement component 6 peptide 26
  MOD_RES (14)..(14): Arg-carbamidomethyl oxidation
VYQIGESIELTCPR

SEQ ID NO: 563 - protein, 11 aa, Artificial Sequence
  Description of Artificial Sequence: Complement component 6 peptide 27
YGGSFLQGSEK

SEQ ID NO: 564 - protein, 17 aa, Artificial Sequence
  Description of Artificial Sequence: Complement component C1SA peptide 1
  MOD_RES (17)..(17): Arg-carbamidomethyl oxidation-carbamidomethyl oxidation
CIPACGVPTEPFQVHQR

SEQ ID NO: 565 - protein, 22 aa, Artificial Sequence
  Description of Artificial Sequence: Complement component C1SA peptide 2
IFGGQPAKIENFPWQVFFNHPR

SEQ ID NO: 566 - protein, 16 aa, Artificial Sequence
  Description of Artificial Sequence: Complement component C1SA peptide 3
  MOD_RES (15)..(16): Methionin oxidation
ISDPLMYVGTMSVRMM

SEQ ID NO: 567 - protein, 14 aa, Artificial Sequence
  Description of Artificial Sequence: Complement component C1SA peptide 4
LQVVFTSDFSNEER

SEQ ID NO: 568 - protein, 12 aa, Artificial Sequence
  Description of Artificial Sequence: Complement component C1SA peptide 5
  MOD_RES (12)..(12): Lys-carbamidomethyl oxidation
LRYHGDPISCAK

SEQ ID NO: 569 - protein, 19 aa, Artificial Sequence
  Description of Artificial Sequence: Complement component C1SA peptide 6
  MOD_RES (19)..(19): Arg-carbamidomethyl oxidation
NQQFGPYCGNGFPGPLTIR

SEQ ID NO: 570 - protein, 16 aa, Artificial Sequence
  Description of Artificial Sequence: Complement component C1SA peptide 7
SPNSPIIEEFQFPYNK

SEQ ID NO: 571 - protein, 12 aa, Artificial Sequence
  Description of Artificial Sequence: Complement component C1SA peptide 8
WVNDQLGIELPR

SEQ ID NO: 572 - protein, 10 aa, Artificial Sequence
  Description of Artificial Sequence: Complement component C1SA peptide 9
  MOD_RES (10)..(10): Lys-carbamidomethyl oxidation
YHGDPISCAK

SEQ ID NO: 573 - protein, 17 aa, Artificial Sequence
  Description of Artificial Sequence: Complement component factor h peptide 1
  MOD_RES (17)..(17): Arg-carbamidomethyl oxidation
CDNGFSPPSGYSWDYLR

SEQ ID NO: 574 - protein, 22 aa, Artificial Sequence
  Description of Artificial Sequence: Complement component factor h peptide 2
  MOD_RES (22)..(22): Arg-carbamidomethyl oxidation-carbamidomethyl oxidation
CIEKIPCSQPPTIEHGSINLPR

SEQ ID NO: 575 - protein, 11 aa, Artificial Sequence
  Description of Artificial Sequence: Complement component factor h peptide 3
  MOD_RES (11)..(11): Arg-carbamidomethyl oxidation
CLPVTELENGR

SEQ ID NO: 576 - protein, 15 aa, Artificial Sequence
  Description of Artificial Sequence: Complement component factor h peptide 4
  MOD_RES (15)..(15): Arg-carbamidomethyl oxidation
CSPPYILNGIYTPHR

SEQ ID NO: 577 - protein, 14 aa, Artificial Sequence
  Description of Artificial Sequence: Complement component factor h peptide 5
  MOD_RES (14)..(14): Arg-carbamidomethyl oxidation-carbamidomethyl oxidation
CTAQGWEPEVPCVR

SEQ ID NO: 578 - protein, 15 aa, Artificial Sequence
  Description of Artificial Sequence: Complement component factor h peptide 6
  MOD_RES (15)..(15): Lys-carbamidomethyl oxidation-carbamidomethyl oxidation
CTAQGWEPEVPCVRK

SEQ ID NO: 579 - protein, 12 aa, Artificial Sequence
  Description of Artificial Sequence: Complement component factor h peptide 7
  MOD_RES (12)..(12): Lys-carbamidomethyl oxidation-carbamidomethyl oxidation
CTLKPCEFPQFK

SEQ ID NO: 580 - protein, 15 aa, Artificial Sequence
  Description of Artificial Sequence: Complement component factor h peptide 8
  MOD_RES (15)..(15): Arg-carbamidomethyl oxidation-carbamidomethyl oxidation
CTLKPCEFPQFKYGR

SEQ ID NO: 581 - protein, 11 aa, Artificial Sequence
  Description of Artificial Sequence: Complement component factor h peptide 9
  MOD_RES (11)..(11): Arg-carbamidomethyl oxidation
CTPTGWIPVPR

SEQ ID NO: 582 - protein, 11 aa, Artificial Sequence
  Description of Artificial Sequence: Complement component factor h peptide 10
  MOD_RES (11)..(11): Arg-carbamidomethyl oxidation-carbamidomethyl oxidation
CVATDQLEKCR

SEQ ID NO: 583 - protein, 10 aa, Artificial Sequence
  Description of Artificial Sequence: Complement component factor h peptide 11
  MOD_RES (10)..(10): Arg-carbamidomethyl oxidation-carbamidomethyl oxidation
CVEILCTPPR

SEQ ID NO: 584 - protein, 20 aa, Artificial Sequence
  Description of Artificial Sequence: Complement component factor h peptide 12
  MOD_RES (20)..(20): Arg-carbamidomethyl oxidation-carbamidomethyl oxidation
GDAVCTGSGWSSQPFCEEKR

SEQ ID NO: 585 - protein, 18 aa, Artificial Sequence
  Description of Artificial Sequence: Complement component factor h peptide 13
  MOD_RES (18)..(18): Lys-carbamidomethyl oxidation
HTEKIYSHSGEDIEFGCK

SEQ ID NO: 586 - protein, 10 aa, Artificial Sequence
  Description of Artificial Sequence: Complement component factor h peptide 14
IIHRSDDEIR

SEQ ID NO: 587 - protein, 27 aa, Artificial Sequence
  Description of Artificial Sequence: Complement component factor h peptide 15
  MOD_RES (27)..(27): Arg-carbamidomethyl oxidation
IKTCSASDIHIDNGFLSESSSIYALNR

SEQ ID NO: 588 - protein, 18 aa, Artificial Sequence
  Description of Artificial Sequence: Complement component factor h peptide 16
  MOD_RES (18)..(18): Arg-carbamidomethyl oxidation
IPCSQPPTIEHGSINLPR

SEQ ID NO: 589 - protein, 19 aa, Artificial Sequence
  Description of Artificial Sequence: Complement component factor h peptide 17
IVSGAAETDQEYYFGQVVR

SEQ ID NO: 590 - protein, 15 aa, Artificial Sequence
  Description of Artificial Sequence: Complement component factor h peptide 18
  MOD_RES (15)..(15): Arg-carbamidomethyl oxidation
KPCGHPGDTPFGSFR

SEQ ID NO: 591 - protein, 11 aa, Artificial Sequence
  Description of Artificial Sequence: Complement component factor h peptide 19
KVEYSHGEVVK

SEQ ID NO: 592 - protein, 18 aa, Artificial Sequence
  Description of Artificial Sequence: Complement component factor h peptide 20
LYYEESLRPNFPVSIGNK

SEQ ID NO: 593 - protein, 22 aa, Artificial Sequence
  Description of Artificial Sequence: Complement component factor h peptide 21
LYYEESLRPNFPVSIGNKYSYK

SEQ ID NO: 594 - protein, 11 aa, Artificial Sequence
  Description of Artificial Sequence: Complement component factor h peptide 22
NGKWVASNPSR

SEQ ID NO: 595 - protein, 17 aa, Artificial Sequence
  Description of Artificial Sequence: Complement component factor h peptide 23
  MOD_RES (16)..(16): Arg-carbamidomethyl oxidation
  MOD_RES (17)..(17): Methionin oxidation
SCDMPVFENSITKNTRM

SEQ ID NO: 596 - protein, 23 aa, Artificial Sequence
  Description of Artificial Sequence: Complement component factor h peptide 24
  MOD_RES (23)..(23): Lys-carbamidomethyl oxidation
SDDEIRYECNYGFYPVTGSTVSK

SEQ ID NO: 597 - protein, 11 aa, Artificial Sequence
  Description of Artificial Sequence: Complement component factor h peptide 25
SYRTGEQVTFR

SEQ ID NO: 598 - protein, 14 aa, Artificial Sequence
  Description of Artificial Sequence: Complement component factor h peptide 26
  MOD_RES (14)..(14): Lys-carbamidomethyl oxidation
TCGDIPELEHGSAK

SEQ ID NO: 599 - protein, 20 aa, Artificial Sequence
  Description of Artificial Sequence: Complement component factor h peptide 27
  MOD_RES (20)..(20): Lys-carbamidomethyl oxidation
TSCPPPPQIPNTQVIETTVK

SEQ ID NO: 600 - protein, 14 aa, Artificial Sequence
  Description of Artificial Sequence: Complement component factor h peptide 28
  MOD_RES (14)..(14): Arg-carbamidomethyl oxidation
VGDLLEFSCHSGHR

SEQ ID NO: 601 - protein, 21 aa, Artificial Sequence
  Description of Artificial Sequence: Complement component factor h peptide 29
  MOD_RES (21)..(21): Lys-carbamidomethyl oxidation-carbamidomethyl oxidation
VGPDSVQCYHFGWSPGFPTCK

SEQ ID NO: 602 - protein, 16 aa, Artificial Sequence
  Description of Artificial Sequence: Complement component factor h peptide 30
  MOD_RES (16)..(16): Arg-carbamidomethyl oxidation
YRVGDLLEFSCHSGHR

SEQ ID NO: 603 - protein, 24 aa, Artificial Sequence
  Description of Artificial Sequence: Complement component factor i peptide 1
  MOD_RES (24)..(24): Arg-carbamidomethyl oxidation-carbamidomethyl oxidation
ECELPNSVPACVPWSPYLFQPNDR

SEQ ID NO: 604 - protein, 24 aa, Artificial Sequence
  Description of Artificial Sequence: Complement component factor i peptide 2
  MOD_RES (24)..(24): Arg-carbamidomethyl oxidation-carbamidomethyl oxidation- carbamidomethyl oxidation
ITCGGIYIGGCWILTAAHCVRPSR

SEQ ID NO: 605 - protein, 16 aa, Artificial Sequence
  Description of Artificial Sequence: Complement component factor i peptide 3
SPSASDLPQEELVDQK

SEQ ID NO: 606 - protein, 14 aa, Artificial Sequence
  Description of Artificial Sequence: Complement component factor i peptide 4
VANYFDWISYHVGR

SEQ ID NO: 607 - protein, 22 aa, Artificial Sequence
  Description of Artificial Sequence: Complement component factor i peptide 5
VANYFDWISYHVGRSLVSQHNV

SEQ ID NO: 608 - protein, 23 aa, Artificial Sequence
  Description of Artificial Sequence: Complement component factor i peptide 6
VIGGKPANVGDYPWQVAIKDGQR

SEQ ID NO: 609 - protein, 22 aa, Artificial Sequence
  Description of Artificial Sequence: Complement component factor i peptide 7
VIVHEKYNGATFQNDIALIEMK

SEQ ID NO: 610 - protein, 10 aa, Artificial Sequence
  Description of Artificial Sequence: Complement D Chain D, N-Terminally Truncated C3dg Fragment peptide 1
DFDSVPPVVR

SEQ ID NO: 611 - protein, 16 aa, Artificial Sequence
  Description of Artificial Sequence: Complement D Chain D, N-Terminally Truncated C3dg Fragment peptide 2
  MOD_RES (16)..(16): Lys-carbamidomethyl oxidation
DICEGQVNSLPGSINK

SEQ ID NO: 612 - protein, 18 aa, Artificial Sequence
  Description of Artificial Sequence: Complement D Chain D, N-Terminally Truncated C3dg Fragment peptide 3
EADVSLTAFVLIALQEAR

SEQ ID NO: 613 - protein, 8 aa, Artificial Sequence
  Description of Artificial Sequence: Complement D Chain D, N-Terminally Truncated C3dg Fragment peptide 4
FLNTAKDR

SEQ ID NO: 614 - protein, 9 aa, Artificial Sequence
  Description of Artificial Sequence: Complement D Chain D, N-Terminally Truncated C3dg Fragment peptide 5
GYTQQLAFK

SEQ ID NO: 615 - protein, 10 aa, Artificial Sequence
  Description of Artificial Sequence: Complement D Chain D, N-Terminally Truncated C3dg Fragment peptide 6
KGYTQQLAFK

SEQ ID NO: 616 - protein, 23 aa, Artificial Sequence
  Description of Artificial Sequence: Complement D Chain D, N-Terminally Truncated C3dg Fragment peptide 7
QKPDGVFQEDGPVIHQEMIGGFR

SEQ ID NO: 617 - protein, 9 aa, Artificial Sequence
  Description of Artificial Sequence: Complement D Chain D, N-Terminally Truncated C3dg Fragment peptide 8
RQEALELIK

SEQ ID NO: 618 - protein, 6 aa, Artificial Sequence
  Description of Artificial Sequence: Complement D Chain D, N-Terminally Truncated C3dg Fragment peptide 9
WLILEK

SEQ ID NO: 619 - protein, 6 aa, Artificial Sequence
  Description of Artificial Sequence: Complement D Chain D, N-Terminally Truncated C3dg Fragment peptide 10
WLNDER

SEQ ID NO: 620 - protein, 13 aa, Artificial Sequence
  Description of Artificial Sequence: Complement histocompatibility 2, Q region locus 10 peptide 1
AKGNEQSFHVSLR

SEQ ID NO: 621 - protein, 14 aa, Artificial Sequence
  Description of Artificial Sequence: Complement histocompatibility 2, Q region locus 10 peptide 2
APWMEQEGPEYWER

SEQ ID NO: 622 - protein, 18 aa, Artificial Sequence
  Description of Artificial Sequence: Complement histocompatibility 2, Q region locus 10 peptide 3
APWMEQEGPEYWERETQR

SEQ ID NO: 623 - protein, 13 aa, Artificial Sequence
  Description of Artificial Sequence: Complement histocompatibility 2, Q region locus 10 peptide 4
  MOD_RES (13)..(13): Arg-carbamidomethyl oxidation
AYLEAECVEWLLR

SEQ ID NO: 624 - protein, 13 aa, Artificial Sequence
  Description of Artificial Sequence: Complement histocompatibility 2, Q region locus 10 peptide 5
FDSDAETPRMEPR

SEQ ID NO: 625 - protein, 14 aa, Artificial Sequence
  Description of Artificial Sequence: Complement histocompatibility 2, Q region locus 10 peptide 6
FIIVGYVDDTQFVR

SEQ ID NO: 626 - protein, 23 aa, Artificial Sequence
  Description of Artificial Sequence: Complement histocompatibility 2, Q region locus 10 peptide 7
FIIVGYVDDTQFVRFDSDAETPR

SEQ ID NO: 627 - protein, 11 aa, Artificial Sequence
  Description of Artificial Sequence: Complement histocompatibility 2, Q region locus 10 peptide 8
GNEQSFHVSLR

SEQ ID NO: 628 - protein, 10 aa, Artificial Sequence
  Description of Artificial Sequence: Complement histocompatibility 2, Q region locus 10 peptide 9
GYLQYAYDGR

SEQ ID NO: 629 - protein, 20 aa, Artificial Sequence
  Description of Artificial Sequence: Complement histocompatibility 2, Q region locus 10 peptide 10
GYLQYAYDGRDYIALNEDLK

SEQ ID NO: 630 - protein, 12 aa, Artificial Sequence
  Description of Artificial Sequence: Complement histocompatibility 2, Q region locus 10 peptide 11
KWEQAGAAEYYR

SEQ ID NO: 631 - protein, 21 aa, Artificial Sequence
  Description of Artificial Sequence: Complement histocompatibility 2, Q region locus 10 peptide 12
TDPPKTHVTHHPGSEGDVTLR

SEQ ID NO: 632 - protein, 16 aa, Artificial Sequence
  Description of Artificial Sequence: Complement histocompatibility 2, Q region locus 10 peptide 13
THVTHHPGSEGDVTLR

SEQ ID NO: 633 - protein, 13 aa, Artificial Sequence
  Description of Artificial Sequence: Complement histocompatibility 2, Q region locus 10 peptide 14
TWTAADVAAIITR

SEQ ID NO: 634 - protein, 10 aa, Artificial Sequence
  Description of Artificial Sequence: Complement histocompatibility 2, Q region locus 10 peptide 15
WASVVVPLGK

SEQ ID NO: 635 - protein, 11 aa, Artificial Sequence
  Description of Artificial Sequence: Complement histocompatibility 2, Q region locus 10 peptide 16
WEQAGAAEYYR

SEQ ID NO: 636 - protein, 15 aa, Artificial Sequence
  Description of Artificial Sequence: Complement histocompatibility 2, Q region locus 10 peptide 17
YFETSVSRPGLGEPR

SEQ ID NO: 637 - protein, 11 aa, Artificial Sequence
  Description of Artificial Sequence: Complement histocompatibility 2, Q region locus 10 peptide 18
YLELGKETLLR

SEQ ID NO: 638 - protein, 19 aa, Artificial Sequence
  Description of Artificial Sequence: Contraspin peptide 1
ALYQTEAFTADFQQPTEAK

SEQ ID NO: 639 - protein, 23 aa, Artificial Sequence
  Description of Artificial Sequence: Contraspin peptide 2
AVLDVAETGTEAAAATGVIGGIR

SEQ ID NO: 640 - protein, 24 aa, Artificial Sequence
  Description of Artificial Sequence: Contraspin peptide 3
AVLDVAETGTEAAAATGVIGGIRK

SEQ ID NO: 641 - protein, 30 aa, Artificial Sequence
  Description of Artificial Sequence: Contraspin peptide 4
  MOD_RES (29)..(29): Lys-carbamidomethyl oxidation
  MOD_RES (30)..(30): Methionin oxidation
AVLPAVCFNRPFLIVIYHTSAQSILFMAKM

SEQ ID NO: 642 - protein, 11 aa, Artificial Sequence
  Description of Artificial Sequence: Contraspin peptide 5
DLQILAEFHEK

SEQ ID NO: 643 - protein, 13 aa, Artificial Sequence
  Description of Artificial Sequence: Contraspin peptide 6
DLQILAEFHEKTR

SEQ ID NO: 644 - protein, 16 aa, Artificial Sequence
  Description of Artificial Sequence: Contraspin peptide 7
EVFTEQADLSGITEAK

SEQ ID NO: 645 - protein, 17 aa, Artificial Sequence
  Description of Artificial Sequence: Contraspin peptide 8
EVFTEQADLSGITEAKK

SEQ ID NO: 646 - protein, 20 aa, Artificial Sequence
  Description of Artificial Sequence: Contraspin peptide 9
FSIASDYRLEEDVLPEMGIK

SEQ ID NO: 647 - protein, 13 aa, Artificial Sequence
  Description of Artificial Sequence: Contraspin peptide 10
  MOD_RES (13)..(13): Methionin oxidation
GKTMEEILEGLKM

SEQ ID NO: 648 - protein, 15 aa, Artificial Sequence
  Description of Artificial Sequence: Contraspin peptide 11
  MOD_RES (15)..(15): Lys-carbamidomethyl oxidation
HFRDEELSCSVLELK

SEQ ID NO: 649 - protein, 19 aa, Artificial Sequence
  Description of Artificial Sequence: Contraspin peptide 12
ISFDPQDTFESEFYLDEKR

SEQ ID NO: 650 - protein, 22 aa, Artificial Sequence
  Description of Artificial Sequence: Contraspin peptide 13
  MOD_RES (22)..(22): Methionin oxidation
KLISELDDGTLMVLVNYIYFKM

SEQ ID NO: 651 - protein, 10 aa, Artificial Sequence
  Description of Artificial Sequence: Contraspin peptide 14
KLSVSQVVHK

SEQ ID NO: 652 - protein, 15 aa, Artificial Sequence
  Description of Artificial Sequence: Contraspin peptide 15
KTLFSSQIEELNLPK

SEQ ID NO: 653 - protein, 21 aa, Artificial Sequence
  Description of Artificial Sequence: Contraspin peptide 16
  MOD_RES (21)..(21): Methionin oxidation
LISELDDGTLMVLVNYIYFKM

SEQ ID NO: 654 - protein, 14 aa, Artificial Sequence
  Description of Artificial Sequence: Contraspin peptide 17
MQQVEASLQPETLR

SEQ ID NO: 655 - protein, 15 aa, Artificial Sequence
  Description of Artificial Sequence: Contraspin peptide 18
MQQVEASLQPETLRK

SEQ ID NO: 656 - protein, 21 aa, Artificial Sequence
  Description of Artificial Sequence: Contraspin peptide 19
NIVFSPLSISAALALVSLGAK

SEQ ID NO: 657 - protein, 25 aa, Artificial Sequence
  Description of Artificial Sequence: Contraspin peptide 20
NQDKNIVFSPLSISAALALVSLGAK

SEQ ID NO: 658 - protein, 14 aa, Artificial Sequence
  Description of Artificial Sequence: Contraspin peptide 21
TLFSSQIEELNLPK

SEQ ID NO: 659 - protein, 21 aa, Artificial Sequence
  Description of Artificial Sequence: Contraspin peptide 22
TRALYQTEAFTADFQQPTEAK

SEQ ID NO: 660 - protein, 20 aa, Artificial Sequence
  Description of Artificial Sequence: Cp protein peptide 1
AEDEHLGILGPPIHANVGDK

SEQ ID NO: 661 - protein, 22 aa, Artificial Sequence
  Description of Artificial Sequence: Cp protein peptide 2
AEDEHLGILGPPIHANVGDKVK

SEQ ID NO: 662 - protein, 12 aa, Artificial Sequence
  Description of Artificial Sequence: Cp protein peptide 3
AEVEDKVYVHLK

SEQ ID NO: 663 - protein, 10 aa, Artificial Sequence
  Description of Artificial Sequence: Cp protein peptide 4
AGLQAFFQVR

SEQ ID NO: 664 - protein, 13 aa, Artificial Sequence
  Description of Artificial Sequence: Cp protein peptide 5
ALYFEYTDGTFSK

SEQ ID NO: 665 - protein, 14 aa, Artificial Sequence
  Description of Artificial Sequence: Cp protein peptide 6
  MOD_RES (14)..(14): Arg-carbamidomethyl oxidation
DCNKPSPEDNIQDR

SEQ ID NO: 666 - protein, 14 aa, Artificial Sequence
  Description of Artificial Sequence: Cp protein peptide 7
  MOD_RES (14)..(14): Lys-carbamidomethyl oxidation
DIFTGLIGPMKICK

SEQ ID NO: 667 - protein, 14 aa, Artificial Sequence
  Description of Artificial Sequence: Cp protein peptide 8
  MOD_RES (14)..(14): Arg-carbamidomethyl oxidation
DLYSGLIGPLIVCR

SEQ ID NO: 668 - protein, 9 aa, Artificial Sequence
  Description of Artificial Sequence: Cp protein peptide 9
DTANLFPHK

SEQ ID NO: 669 - protein, 15 aa, Artificial Sequence
  Description of Artificial Sequence: Cp protein peptide 10
  MOD_RES (15)..(15): Methionin oxidation-carbamidomethyl oxidation
EMGPTYADPVCLSKM

SEQ ID NO: 670 - protein, 11 aa, Artificial Sequence
  Description of Artificial Sequence: Cp protein peptide 11
ETFTYEWTVPK

SEQ ID NO: 671 - protein, 10 aa, Artificial Sequence
  Description of Artificial Sequence: Cp protein peptide 12
EYTDGSFTNR

SEQ ID NO: 672 - protein, 11 aa, Artificial Sequence
  Description of Artificial Sequence: Cp protein peptide 13
EYTDGSFTNRK

SEQ ID NO: 673 - protein, 29 aa, Artificial Sequence
  Description of Artificial Sequence: Cp protein peptide 14
  MOD_RES (29)..(29): Methionin oxidation
GQHPLSIQPMGVSFTAENEGTYYGPPGRM

SEQ ID NO: 674 - protein, 10 aa, Artificial Sequence
  Description of Artificial Sequence: Cp protein peptide 15
IYHSHVDAPK

SEQ ID NO: 675 - protein, 24 aa, Artificial Sequence
  Description of Artificial Sequence: Cp protein peptide 16
  MOD_RES (24)..(24): Lys-carbamidomethyl oxidation
IYHSHVDAPKDIASGLIGPLILCK

SEQ ID NO: 676 - protein, 13 aa, Artificial Sequence
  Description of Artificial Sequence: Cp protein peptide 17
IYTFHAHGVTYTK

SEQ ID NO: 677 - protein, 14 aa, Artificial Sequence
  Description of Artificial Sequence: Cp protein peptide 18
KALYFEYTDGTFSK

SEQ ID NO: 678 - protein, 20 aa, Artificial Sequence
  Description of Artificial Sequence: Cp protein peptide 19
KLISVDTEQSNFYLQNGPDR

SEQ ID NO: 679 - protein, 19 aa, Artificial Sequence
  Description of Artificial Sequence: Cp protein peptide 20
LISVDTEQSNFYLQNGPDR

SEQ ID NO: 680 - protein, 15 aa, Artificial Sequence
  Description of Artificial Sequence: Cp protein peptide 21
  MOD_RES (15)..(15): Methionin oxidation
MAYREYTDGSFTNRM

SEQ ID NO: 681 - protein, 15 aa, Artificial Sequence
  Description of Artificial Sequence: Cp protein peptide 22
  MOD_RES (14)..(15): Methionin oxidation
MFGNLQGLTMHVKMM

SEQ ID NO: 682 - protein, 22 aa, Artificial Sequence
  Description of Artificial Sequence: Cp protein peptide 23
  MOD_RES (22)..(22): Methionin oxidation
MFTTAPDQVDKEDEDFQESNKM

SEQ ID NO: 683 - protein, 21 aa, Artificial Sequence
  Description of Artificial Sequence: Cp protein peptide 24
MYYSGVDPTKDIFTGLIGPMK

SEQ ID NO: 684 - protein, 15 aa, Artificial Sequence
  Description of Artificial Sequence: Cp protein peptide 25
NMATRPYSIHAHGVK

SEQ ID NO: 685 - protein, 16 aa, Artificial Sequence
  Description of Artificial Sequence: Cp protein peptide 26
  MOD_RES (16)..(16): Methionin oxidation
NMATRPYSIHAHGVKM

SEQ ID NO: 686 - protein, 12 aa, Artificial Sequence
  Description of Artificial Sequence: Cp protein peptide 27
QFEDFTVYLGER

SEQ ID NO: 687 - protein, 10 aa, Artificial Sequence
  Description of Artificial Sequence: Cp protein peptide 28
  MOD_RES (10)..(10): Arg-carbamidomethyl oxidation
QKYTVNQCQR

SEQ ID NO: 688 - protein, 21 aa, Artificial Sequence
  Description of Artificial Sequence: Cp protein peptide 29
RAEDEHLGILGPPIHANVGDK

SEQ ID NO: 689 - protein, 10 aa, Artificial Sequence
  Description of Artificial Sequence: Cp protein peptide 30
RDTANLFPHK

SEQ ID NO: 690 - protein, 21 aa, Artificial Sequence
  Description of Artificial Sequence: Cp protein peptide 31
  MOD_RES (21)..(21): Arg-carbamidomethyl oxidation
SGAGREDSACIPWAYYSTVDR

SEQ ID NO: 691 - protein, 12 aa, Artificial Sequence
  Description of Artificial Sequence: Cp protein peptide
  MOD_RES (12)..(12): Methionin oxidation
SLTLLMNPDTKM

SEQ ID NO: 692 - protein, 15 aa, Artificial Sequence
  Description of Artificial Sequence: Cp protein peptide 33
TESSTVVPTLPGEVR

SEQ ID NO: 693 - protein, 16 aa, Artificial Sequence
  Description of Artificial Sequence: Cp protein peptide 34
TIDKPAWLGFLGPVIK

SEQ ID NO: 694 - protein, 9 aa, Artificial Sequence
  Description of Artificial Sequence: Cp protein peptide 35
TYTWQIPER

SEQ ID NO: 695 - protein, 17 aa, Artificial Sequence
  Description of Artificial Sequence: Cp protein peptide 36
TYYVAAVEVEWDYSPSR

SEQ ID NO: 696 - protein, 9 aa, Artificial Sequence
  Description of Artificial Sequence: Cp protein peptide 37
VFFEQGATR

SEQ ID NO: 697 - protein, 16 aa, Artificial Sequence
  Description of Artificial Sequence: Cp protein peptide 38
  MOD_RES (16)..(16): Arg-carbamidomethyl oxidation
VKDLYSGLIGPLIVCR

SEQ ID NO: 698 - protein, 13 aa, Artificial Sequence
  Description of Artificial Sequence: Cp protein peptide 39
VNKDNEEFLESNK

SEQ ID NO: 699 - protein, 8 aa, Artificial Sequence
  Description of Artificial Sequence: Cp protein peptide 40
  MOD_RES (8)..(8): Arg-carbamidomethyl oxidation
YTVNQCQR

SEQ ID NO: 700 - protein, 23 aa, Artificial Sequence
  Description of Artificial Sequence: Cpn2 protein peptide 1
  MOD_RES (23)..(23): Arg-carbamidomethyl oxidation-carbamidomethyl oxidation
AAHSQCAYSNPEGTVLLACEESR

SEQ ID NO: 701 - protein, 20 aa, Artificial Sequence
  Description of Artificial Sequence: Cpn2 protein peptide 2
ALGLDEGEPAGSWDLTVEGR

SEQ ID NO: 702 - protein, 11 aa, Artificial Sequence
  Description of Artificial Sequence: Cpn2 protein peptide 3
  MOD_RES (11)..(11): Arg-carbamidomethyl oxidation
CRWLNIQLSSR

SEQ ID NO: 703 - protein, 17 aa, Artificial Sequence
  Description of Artificial Sequence: Cpn2 protein peptide 4
DLRTLNLAQNLLTQLPK

SEQ ID NO: 704 - protein, 13 aa, Artificial Sequence
  Description of Artificial Sequence: Cpn2 protein peptide 5
GAFQSLTGLQMLK

SEQ ID NO: 705 - protein, 24 aa, Artificial Sequence
  Description of Artificial Sequence: Cpn2 protein peptide 6
  MOD_RES (24)..(24): Arg-carbamidomethyl oxidation
GQLVPNLKQEQLICPVNPGHLSFR

SEQ ID NO: 706 - protein, 12 aa, Artificial Sequence
  Description of Artificial Sequence: Cpn2 protein peptide 7
HLEPDAFGGLPR

SEQ ID NO: 707 - protein, 9 aa, Artificial Sequence
  Description of Artificial Sequence: Cpn2 protein peptide 8
LFQSLRDLR

SEQ ID NO: 708 - protein, 20 aa, Artificial Sequence
  Description of Artificial Sequence: Cpn2 protein peptide 9
LVSLTLSHNAITDLPEHVFR

SEQ ID NO: 709 - protein, 27 aa, Artificial Sequence
  Description of Artificial Sequence: Cpn2 protein peptide 10
LVSLTLSHNAITDLPEHVFRNLEQLVK

SEQ ID NO: 710 - protein, 16 aa, Artificial Sequence
  Description of Artificial Sequence: Cpn2 protein peptide 11
  MOD_RES (16)..(16): Arg-carbamidomethyl oxidation
QEQLICPVNPGHLSFR

SEQ ID NO: 711 - protein, 14 aa, Artificial Sequence
  Description of Artificial Sequence: Cpn2 protein peptide 12
TLNLAQNLLTQLPK

SEQ ID NO: 712 - protein, 11 aa, Artificial Sequence
  Description of Artificial Sequence: Cpn2 protein peptide 13
TLPGRLFQSLR

SEQ ID NO: 713 - protein, 9 aa, Artificial Sequence
  Description of Artificial Sequence: Cpn2 protein peptide 14
VVFLNTQVR

SEQ ID NO: 714 - protein, 9 aa, Artificial Sequence
  Description of Artificial Sequence: Cpn2 protein peptide 15
WLNIQLSSR

SEQ ID NO: 715 - protein, 15 aa, Artificial Sequence
  Description of Artificial Sequence: Epidermal growth factor receptor isoform 2 peptide 1
  MOD_RES (15)..(15): Arg-carbamidomethyl oxidation
ACGPDYYEVEEDGIR

SEQ ID NO: 716 - protein, 16 aa, Artificial Sequence
  Description of Artificial Sequence: Epidermal growth factor receptor isoform 2 peptide 2
  MOD_RES (16)..(16): Lys-carbamidomethyl oxidation
ACGPDYYEVEEDGIRK

SEQ ID NO: 717 - protein, 21 aa, Artificial Sequence
  Description of Artificial Sequence: Epidermal growth factor receptor isoform 2 peptide 3
  MOD_RES (21)..(21): Arg-carbamidomethyl oxidation-carbamidomethyl oxidation- carbamidomethyl oxidation
AVNHVCNPLCSSEGCWGPEPR

SEQ ID NO: 718 - protein, 9 aa, Artificial Sequence
  Description of Artificial Sequence: Epidermal growth factor receptor isoform 2 peptide 4
  MOD_RES (9)..(9): Arg-carbamidomethyl oxidation
CNILEGEPR

SEQ ID NO: 719 - protein, 16 aa, Artificial Sequence
  Description of Artificial Sequence: Epidermal growth factor receptor isoform 2 peptide 5
  MOD_RES (16)..(16): Arg-carbamidomethyl oxidation
FSNNPILCNMDTIQWR

SEQ ID NO: 720 - protein, 19 aa, Artificial Sequence
  Description of Artificial Sequence: Epidermal growth factor receptor isoform 2 peptide 6
  MOD_RES (19)..(19): Lys-carbamidomethyl oxidation-carbamidomethyl oxidation- carbamidomethyl oxidation
GPDNCIQCAHYIDGPHCVK

SEQ ID NO: 721 - protein, 20 aa, Artificial Sequence
  Description of Artificial Sequence: Epidermal growth factor receptor isoform 2 peptide 7
  MOD_RES (20)..(20): Arg-carbamidomethyl oxidation-carbamidomethyl oxidation- carbamidomethyl oxidation-carbamidomethyl oxidation
GRSPSDCCHNQCAAGCTGPR

SEQ ID NO: 722 - protein, 10 aa, Artificial Sequence
  Description of Artificial Sequence: Epidermal growth factor receptor isoform 2 peptide 8
  MOD_RES (10)..(10): Arg-carbamidomethyl oxidation-carbamidomethyl oxidation
IICAQQCSHR

SEQ ID NO: 723 - protein, 10 aa, Artificial Sequence
  Description of Artificial Sequence: Epidermal growth factor receptor isoform 2 peptide 9
IPLENLQIIR

SEQ ID NO: 724 - protein, 9 aa, Artificial Sequence
  Description of Artificial Sequence: Epidermal growth factor receptor isoform 2 peptide 10
KLFGTPNQK

SEQ ID NO: 725 - protein, 16 aa, Artificial Sequence
  Description of Artificial Sequence: Epidermal growth factor receptor isoform 2 peptide 11
LTQLGTFEDHFLSLQR

SEQ ID NO: 726 - protein, 20 aa, Artificial Sequence
  Description of Artificial Sequence: Epidermal growth factor receptor isoform 2 peptide 12
  MOD_RES (20)..(20): Methionin oxidation-carbamidomethyl oxidation
MYNNCEVVLGNLEITYVQRM

SEQ ID NO: 727 - protein, 11 aa, Artificial Sequence
  Description of Artificial Sequence: Epidermal growth factor receptor isoform 2 peptide 13
  MOD_RES (11)..(11): Lys-carbamidomethyl oxidation
NLCYANTINWK

SEQ ID NO: 728 - protein, 12 aa, Artificial Sequence
  Description of Artificial Sequence: Epidermal growth factor receptor isoform 2 peptide 14
  MOD_RES (12)..(12): Lys-carbamidomethyl oxidation
NLCYANTINWKK

SEQ ID NO: 729 - protein, 11 aa, Artificial Sequence
  Description of Artificial Sequence: Epidermal growth factor receptor isoform 2 peptide 15
NLQEILIGAVR

SEQ ID NO: 730 - protein, 12 aa, Artificial Sequence
  Description of Artificial Sequence: Epidermal growth factor receptor isoform 2 peptide 16
  MOD_RES (12)..(12): Arg-carbamidomethyl oxidation
NYVVTDHGSCVR

SEQ ID NO: 731 - protein, 16 aa, Artificial Sequence
  Description of Artificial Sequence: Epidermal growth factor receptor isoform 2 peptide 17
SLKEISDGDVIISGNR

SEQ ID NO: 732 - protein, 18 aa, Artificial Sequence
  Description of Artificial Sequence: Epidermal growth factor receptor isoform 2 peptide 18
  MOD_RES (18)..(18): Arg-carbamidomethyl oxidation-carbamidomethyl oxidation- carbamidomethyl oxidation-carbamidomethyl oxidation
SPSDCCHNQCAAGCTGPR

SEQ ID NO: 733 - protein, 18 aa, Artificial Sequence
  Description of Artificial Sequence: Epidermal growth factor receptor isoform 2 peptide 19
TIQEVAGYVLIALNTVER

SEQ ID NO: 734 - protein, 13 aa, Artificial Sequence
  Description of Artificial Sequence: Epidermal growth factor receptor isoform 2 peptide 20
TPPLDPRELEILK

SEQ ID NO: 735 - protein, 23 aa, Artificial Sequence
  Description of Artificial Sequence: Epidermal growth factor receptor isoform 2 peptide 21
  MOD_RES (23)..(23): Arg-carbamidomethyl oxidation
YCTAISGDLHILPVAFKGDSFTR

SEQ ID NO: 736 - protein, 10 aa, Artificial Sequence
  Description of Artificial Sequence: Epidermal growth factor receptor isoform 2 peptide 22
  MOD_RES (10)..(10): Lys-carbamidomethyl oxidation
YSFGATCVKK

SEQ ID NO: 737 - protein, 16 aa, Artificial Sequence
  Description of Artificial Sequence: Esterase 1 peptide 1
AISESGVVINTNVGKK

SEQ ID NO: 738 - protein, 14 aa, Artificial Sequence
  Description of Artificial Sequence: Esterase 1 peptide 2
FAPPQPAEPWSFVK

SEQ ID NO: 739 - protein, 17 aa, Artificial Sequence
  Description of Artificial Sequence: Esterase 1 peptide 3
  MOD_RES (17)..(17): Methionin oxidation
ILSDMFSTEKEILPLKM

SEQ ID NO: 740 - protein, 18 aa, Artificial Sequence
  Description of Artificial Sequence: Esterase 1 peptide 4
  MOD_RES (18)..(18): Lys-carbamidomethyl oxidation
ISEDCLYLNIYSPADLTK

SEQ ID NO: 741 - protein, 23 aa, Artificial Sequence
  Description of Artificial Sequence: Esterase 1 peptide 5
KSELILDMFGDIFFGIPAVLLSR

SEQ ID NO: 742 - protein, 15 aa, Artificial Sequence
  Description of Artificial Sequence: Esterase 1 peptide 6
LKAEEVAFWTELLAK

SEQ ID NO: 743 - protein, 11 aa, Artificial Sequence
  Description of Artificial Sequence: Esterase 1 peptide 7
MNEETASLLLR

SEQ ID NO: 744 - protein, 12 aa, Artificial Sequence
  Description of Artificial Sequence: Esterase 1 peptide 8
MNEETASLLLRR

SEQ ID NO: 745 - protein, 11 aa, Artificial Sequence
  Description of Artificial Sequence: Esterase 1 peptide 9
MVMKFWANFAR

SEQ ID NO: 746 - protein, 33 aa, Artificial Sequence
  Description of Artificial Sequence: Esterase 1 peptide 10
NGNPNGEGLPHWPEYDEQEGYLQIGATTQQAQR

SEQ ID NO: 747 - protein, 13 aa, Artificial Sequence
  Description of Artificial Sequence: Esterase 1 peptide 11
QKTESELLEISGK

SEQ ID NO: 748 - protein, 23 aa, Artificial Sequence
  Description of Artificial Sequence: Esterase 1 peptide 12
RPQTVEGDHGDEIFFVFGAPLLK

SEQ ID NO: 749 - protein, 23 aa, Artificial Sequence
  Description of Artificial Sequence: Esterase 1 peptide 13
  MOD_RES (23)..(23): Methionin oxidation
SELILDMFGDIFFGIPAVLLSRM

SEQ ID NO: 750 - protein, 13 aa, Artificial Sequence
  Description of Artificial Sequence: Esterase 1 peptide 14
SFNTVPYIVGFNK

SEQ ID NO: 751 - protein, 15 aa, Artificial Sequence
  Description of Artificial Sequence: Esterase 1 peptide 15
SLRDAGVSTYMYEFR

SEQ ID NO: 752 - protein, 28 aa, Artificial Sequence
  Description of Artificial Sequence: Esterase 1 peptide 16
YISLEGFEQPVAVFLGVPFAKPPLGSLR

SEQ ID NO: 753 - protein, 9 aa, Artificial Sequence
  Description of Artificial Sequence: Esterase 1 peptide 17
YRPSFVSDK

SEQ ID NO: 754 - protein, 32 aa, Artificial Sequence
  Description of Artificial Sequence: Esterase 1 peptide 18
YRPSFVSDKRPQTVEGDHGDEIFFVFGAPLLK

SEQ ID NO: 755 - protein, 11 aa, Artificial Sequence
  Description of Artificial Sequence: Fibrinogen, alpha polypeptide peptide 1
  MOD_RES (10)..(11): Methionin oxidation
ALTEMRQMRMM

SEQ ID NO: 756 - protein, 12 aa, Artificial Sequence
  Description of Artificial Sequence: Fibrinogen, alpha polypeptide peptide 2
AQQIQALQSNVR

SEQ ID NO: 757 - protein, 16 aa, Artificial Sequence
  Description of Artificial Sequence: Fibrinogen, alpha polypeptide peptide 3
AVNREINLQDYEGHQK

SEQ ID NO: 758 - protein, 21 aa, Artificial Sequence
  Description of Artificial Sequence: Fibrinogen, alpha polypeptide peptide 4
  MOD_RES (21)..(21): Arg-carbamidomethyl oxidation-carbamidomethyl oxidation- carbamidomethyl oxidation
DSDWPFCSDDDWNHKCPSGCR

SEQ ID NO: 759 - protein, 12 aa, Artificial Sequence
  Description of Artificial Sequence: Fibrinogen, alpha polypeptide peptide 5
EINLQDYEGHQK

SEQ ID NO: 760 - protein, 20 aa, Artificial Sequence
  Description of Artificial Sequence: Fibrinogen, alpha polypeptide peptide 6
EINLQDYEGHQKQLQQVIAK

SEQ ID NO: 761 - protein, 21 aa, Artificial Sequence
  Description of Artificial Sequence: Fibrinogen, alpha polypeptide peptide 7
GDFANANNFDNTYGQVSEDLR

SEQ ID NO: 762 - protein, 22 aa, Artificial Sequence
  Description of Artificial Sequence: Fibrinogen, alpha polypeptide peptide 8
GDFANANNFDNTYGQVSEDLRR

SEQ ID NO: 763 - protein, 11 aa, Artificial Sequence
  Description of Artificial Sequence: Fibrinogen, alpha polypeptide peptide 9
GDFATRGPGSK

SEQ ID NO: 764 - protein, 10 aa, Artificial Sequence
  Description of Artificial Sequence: Fibrinogen, alpha polypeptide peptide 10
GDSRGDFATR

SEQ ID NO: 765 - protein, 13 aa, Artificial Sequence
  Description of Artificial Sequence: Fibrinogen, alpha polypeptide peptide 11
GLIDEANQDFTNR

SEQ ID NO: 766 - protein, 16 aa, Artificial Sequence
  Description of Artificial Sequence: Fibrinogen, alpha polypeptide peptide 12
GLIDEANQDFTNRINK

SEQ ID NO: 767 - protein, 25 aa, Artificial Sequence
  Description of Artificial Sequence: Fibrinogen, alpha polypeptide peptide 13
HPDLSGFFDNHFGLISPNFKEFGSK

SEQ ID NO: 768 - protein, 10 aa, Artificial Sequence
  Description of Artificial Sequence: Fibrinogen, alpha polypeptide peptide 14
LKNSLFDFQR

SEQ ID NO: 769 - protein, 16 aa, Artificial Sequence
  Description of Artificial Sequence: Fibrinogen, alpha polypeptide peptide 15
MADEAGSEAHREGETR

SEQ ID NO: 770 - protein, 15 aa, Artificial Sequence
  Description of Artificial Sequence: Fibrinogen, alpha polypeptide peptide 16
MKGLIDEANQDFTNR

SEQ ID NO: 771 - protein, 14 aa, Artificial Sequence
  Description of Artificial Sequence: Fibrinogen, alpha polypeptide peptide 17
  MOD_RES (14)..(14): Methionin oxidation
MSPVPDLVPGSFKM

SEQ ID NO: 772 - protein, 25 aa, Artificial Sequence
  Description of Artificial Sequence: Fibrinogen, alpha polypeptide peptide 18
  MOD_RES (25)..(25): Methionin oxidation
MSPVPDLVPGSFKSQLQEAPPEWKM

SEQ ID NO: 773 - protein, 10 aa, Artificial Sequence
  Description of Artificial Sequence: Fibrinogen, alpha polypeptide peptide 19
NNKDSNSLTR

SEQ ID NO: 774 - protein, 21 aa, Artificial Sequence
  Description of Artificial Sequence: Fibrinogen, alpha polypeptide peptide 20
  MOD_RES (21)..(21): Methionin oxidation
QYLPALKMSPVPDLVPGSFKM

SEQ ID NO: 775 - protein, 9 aa, Artificial Sequence
  Description of Artificial Sequence: Fibrinogen, alpha polypeptide peptide 21
RLEVDIDIK

SEQ ID NO: 776 - protein, 11 aa, Artificial Sequence
  Description of Artificial Sequence: Fibrinogen, alpha polypeptide peptide 22
SQLQEAPPEWK

SEQ ID NO: 777 - protein, 17 aa, Artificial Sequence
  Description of Artificial Sequence: Fibrinogen, alpha polypeptide peptide 23
SQLQEAPPEWKALTEMR

SEQ ID NO: 778 - protein, 26 aa, Artificial Sequence
  Description of Artificial Sequence: Fibrinogen, alpha polypeptide peptide 24
THSDSDILTNIEDPSSHVPEFSSSSK

SEQ ID NO: 779 - protein, 16 aa, Artificial Sequence
  Description of Artificial Sequence: Fibrinogen, alpha polypeptide peptide 25
VIEKAQQIQALQSNVR

SEQ ID NO: 780 - protein, 11 aa, Artificial Sequence
  Description of Artificial Sequence: Fibrinogen, alpha polypeptide peptide 26
VTSSGTSTTHR

SEQ ID NO: 781 - protein, 14 aa, Artificial Sequence
  Description of Artificial Sequence: Fibrinogen, B beta polypeptide peptide 1
AHYGGFTVQNEASK

SEQ ID NO: 782 - protein, 21 aa, Artificial Sequence
  Description of Artificial Sequence: Fibrinogen, B beta polypeptide peptide 2
AHYGGFTVQNEASKYQVSVNK

SEQ ID NO: 783 - protein, 10 aa, Artificial Sequence
  Description of Artificial Sequence: Fibrinogen, B beta polypeptide peptide 3
EDGGGWWYNR

SEQ ID NO: 784 - protein, 19 aa, Artificial Sequence
  Description of Artificial Sequence: Fibrinogen, B beta polypeptide peptide 4
EEPPSLRPAPPPISGGGYR

SEQ ID NO: 785 - protein, 17 aa, Artificial Sequence
  Description of Artificial Sequence: Fibrinogen, B beta polypeptide peptide 5
ENENVINEYSSILEDQR

SEQ ID NO: 786 - protein, 12 aa, Artificial Sequence
  Description of Artificial Sequence: Fibrinogen, B beta polypeptide peptide 6
GFGNIATNEDAK

SEQ ID NO: 787 - protein, 13 aa, Artificial Sequence
  Description of Artificial Sequence: Fibrinogen, B beta polypeptide peptide 7
GFGNIATNEDAKK

SEQ ID NO: 788 - protein, 20 aa, Artificial Sequence
  Description of Artificial Sequence: Fibrinogen, B beta polypeptide peptide 8
GGETSEMYLIQPDTSIKPYR

SEQ ID NO: 789 - protein, 9 aa, Artificial Sequence
  Description of Artificial Sequence: Fibrinogen, B beta polypeptide peptide 9
  MOD_RES (9)..(9): Methionin oxidation
GSWYSMRRM

SEQ ID NO: 790 - protein, 13 aa, Artificial Sequence
  Description of Artificial Sequence: Fibrinogen, B beta polypeptide peptide 10
HGTDDGVVWMNWK

SEQ ID NO: 791 - protein, 16 aa, Artificial Sequence
  Description of Artificial Sequence: Fibrinogen, B beta polypeptide peptide 11
  MOD_RES (16)..(16): Arg-carbamidomethyl oxidation
IQKLESDISAQMEYCR

SEQ ID NO: 792 - protein, 8 aa, Artificial Sequence
  Description of Artificial Sequence: Fibrinogen, B beta polypeptide peptide 12
IRPFFPQQ

SEQ ID NO: 793 - protein, 20 aa, Artificial Sequence
  Description of Artificial Sequence: Fibrinogen, B beta polypeptide peptide 13
KEEPPSLRPAPPPISGGGYR

SEQ ID NO: 794 - protein, 21 aa, Artificial Sequence
  Description of Artificial Sequence: Fibrinogen, B beta polypeptide peptide 14
KGGETSEMYLIQPDTSIKPYR

SEQ ID NO: 795 - protein, 16 aa, Artificial Sequence
  Description of Artificial Sequence: Fibrinogen, B beta polypeptide peptide 15
LYIDETVNDNIPLNLR

SEQ ID NO: 796 - protein, 19 aa, Artificial Sequence
  Description of Artificial Sequence: Fibrinogen, B beta polypeptide peptide 16
LYIDETVNDNIPLNLRVLR

SEQ ID NO: 797 - protein, 17 aa, Artificial Sequence
  Description of Artificial Sequence: Fibrinogen, B beta polypeptide peptide 17
MGPTELLIEMEDWKGDK

SEQ ID NO: 798 - protein, 13 aa, Artificial Sequence
  Description of Artificial Sequence: Fibrinogen, B beta polypeptide peptide 18
  MOD_RES (13)..(13): Methionin oxidation
MSMKIRPFFPQQM

SEQ ID NO: 799 - protein, 22 aa, Artificial Sequence
  Description of Artificial Sequence: Fibrinogen, B beta polypeptide peptide 19
QAQVKENENVINEYSSILEDQR

SEQ ID NO: 800 - protein, 14 aa, Artificial Sequence
  Description of Artificial Sequence: Fibrinogen, B beta polypeptide peptide 20
  MOD_RES (14)..(14): Arg-carbamidomethyl oxidation
QCSKEDGGGWWYNR

SEQ ID NO: 801 - protein, 10 aa, Artificial Sequence
  Description of Artificial Sequence: Fibrinogen, B beta polypeptide peptide 21
QDGSVDFGRK

SEQ ID NO: 802 - protein, 9 aa, Artificial Sequence
  Description of Artificial Sequence: Fibrinogen, B beta polypeptide peptide 22
SILEDLRSK

SEQ ID NO: 803 - protein, 12 aa, Artificial Sequence
  Description of Artificial Sequence: Fibrinogen, B beta polypeptide peptide 23
TENGGWTVIQNR

SEQ ID NO: 804 - protein, 15 aa, Artificial Sequence
  Description of Artificial Sequence: Fibrinogen, B beta polypeptide peptide 24
  MOD_RES (15)..(15): Lys-carbamidomethyl oxidation-carbamidomethyl oxidation
TPCTVSCNIPVVSGK

SEQ ID NO: 805 - protein, 22 aa, Artificial Sequence
  Description of Artificial Sequence: Fibrinogen, B beta polypeptide peptide 25
  MOD_RES (22)..(22): Arg-carbamidomethyl oxidation-carbamidomethyl oxidation- carbamidomethyl oxidation
TPCTVSCNIPVVSGKECEEIIR

SEQ ID NO: 806 - protein, 18 aa, Artificial Sequence
  Description of Artificial Sequence: Fibrinogen, B beta polypeptide peptide 26
  MOD_RES (18)..(18): Arg-carbamidomethyl oxidation
VYCDMKTENGGWTVIQNR

SEQ ID NO: 807 - protein, 14 aa, Artificial Sequence
  Description of Artificial Sequence: Fibrinogen, B beta polypeptide peptide 27
  MOD_RES (14)..(14): Lys-carbamidomethyl oxidation
YCGLPGEYWLGNDK

SEQ ID NO: 808 - protein, 20 aa, Artificial Sequence
  Description of Artificial Sequence: Fibrinogen, B beta polypeptide peptide 28
  MOD_RES (20)..(20): Arg-carbamidomethyl oxidation
YCGLPGEYWLGNDKISQLTR

SEQ ID NO: 809 - protein, 13 aa, Artificial Sequence
  Description of Artificial Sequence: Fibrinogen, B beta polypeptide peptide 29
YYWGGLYSWDMSK

SEQ ID NO: 810 - protein, 23 aa, Artificial Sequence
  Description of Artificial Sequence: Fibrinogen, gamma polypeptide peptide 1
AIQVYYNPDQPPKPGMIDSATQK

SEQ ID NO: 811 - protein, 18 aa, Artificial Sequence
  Description of Artificial Sequence: Fibrinogen, gamma polypeptide peptide 2
  MOD_RES (18)..(18): Lys-carbamidomethyl oxidation
CHAGHLNGVYHQGGTYSK

SEQ ID NO: 812 - protein, 9 aa, Artificial Sequence
  Description of Artificial Sequence: Fibrinogen, gamma polypeptide peptide 3
  MOD_RES (9)..(9): Arg-carbamidomethyl oxidation-carbamidomethyl oxidation
DNCCILDER

SEQ ID NO: 813 - protein, 20 aa, Artificial Sequence
  Description of Artificial Sequence: Fibrinogen, gamma polypeptide peptide 4
EGFGHLSPTGTTEFWLGNEK

SEQ ID NO: 814 - protein, 11 aa, Artificial Sequence
  Description of Artificial Sequence: Fibrinogen, gamma polypeptide peptide 5
ESGLYFIRPLK

SEQ ID NO: 815 - protein, 13 aa, Artificial Sequence
  Description of Artificial Sequence: Fibrinogen, gamma polypeptide peptide 6
ESGLYFIRPLKAK

SEQ ID NO: 816 - protein, 27 aa, Artificial Sequence
  Description of Artificial Sequence: Fibrinogen, gamma polypeptide peptide 7
  MOD_RES (27)..(27): Arg-carbamidomethyl oxidation-carbamidomethyl oxidation
FGSFCPTTCGIADFLSSYQTDVDNDLR

SEQ ID NO: 817 - protein, 14 aa, Artificial Sequence
  Description of Artificial Sequence: Fibrinogen, gamma polypeptide peptide 8
GAKESGLYFIRPLK

SEQ ID NO: 818 - protein, 15 aa, Artificial Sequence
  Description of Artificial Sequence: Fibrinogen, gamma polypeptide peptide 9
IHLISMQSTIPYALR

SEQ ID NO: 819 - protein, 21 aa, Artificial Sequence
  Description of Artificial Sequence: Fibrinogen, gamma polypeptide peptide 10
IIPFNRLSIGEGQQHHMGGSK

SEQ ID NO: 820 - protein, 9 aa, Artificial Sequence
  Description of Artificial Sequence: Fibrinogen, gamma polypeptide peptide 11
IQLKDWNGR

SEQ ID NO: 821 - protein, 15 aa, Artificial Sequence
  Description of Artificial Sequence: Fibrinogen, gamma polypeptide peptide 12
LSIGEGQQHHMGGSK

SEQ ID NO: 822 - protein, 20 aa, Artificial Sequence
  Description of Artificial Sequence: Fibrinogen, gamma polypeptide peptide 13
LSIGEGQQHHMGGSKQAGDV

SEQ ID NO: 823 - protein, 20 aa, Artificial Sequence
  Description of Artificial Sequence: Fibrinogen, gamma polypeptide peptide 14
MVEEIVKYEALLLTHETSIR

SEQ ID NO: 824 - protein, 21 aa, Artificial Sequence
  Description of Artificial Sequence: Fibrinogen, gamma polypeptide peptide 15
  MOD_RES (21)..(21): Lys-carbamidomethyl oxidation
QQFLVYCEIDGSGNGWTVLQK

SEQ ID NO: 825 - protein, 22 aa, Artificial Sequence
  Description of Artificial Sequence: Fibrinogen, gamma polypeptide peptide 16
  MOD_RES (22)..(22): Arg-carbamidomethyl oxidation
QQFLVYCEIDGSGNGWTVLQKR

SEQ ID NO: 826 - protein, 9 aa, Artificial Sequence
  Description of Artificial Sequence: Fibrinogen, gamma polypeptide peptide 17
RIDGSLDFK

SEQ ID NO: 827 - protein, 17 aa, Artificial Sequence
  Description of Artificial Sequence: Fibrinogen, gamma polypeptide peptide 18
SSTTNGFDDGIIWATWK

SEQ ID NO: 828 - protein, 19 aa, Artificial Sequence
  Description of Artificial Sequence: Fibrinogen, gamma polypeptide peptide 19
SSTTNGFDDGIIWATWKSR

SEQ ID NO: 829 - protein, 10 aa, Artificial Sequence
  Description of Artificial Sequence: Fibrinogen, gamma polypeptide peptide 20
TSTADYAMFR

SEQ ID NO: 830 - protein, 10 aa, Artificial Sequence
  Description of Artificial Sequence: Fibrinogen, gamma polypeptide peptide 21
WYSMKETTMK

SEQ ID NO: 831 - protein, 12 aa, Artificial Sequence
  Description of Artificial Sequence: Fibrinogen, gamma polypeptide peptide 22
YLQEIYNSNNQK

SEQ ID NO: 832 - protein, 12 aa, Artificial Sequence
  Description of Artificial Sequence: Fibronectin peptide 1
ATGVFTTLQPLR

SEQ ID NO: 833 - protein, 12 aa, Artificial Sequence
  Description of Artificial Sequence: Fibronectin peptide 2
DGQERDAPIVNR

SEQ ID NO: 834 - protein, 23 aa, Artificial Sequence
  Description of Artificial Sequence: Fibronectin peptide 3
DTLTSRPAQGVITTLENVSPPRR

SEQ ID NO: 835 - protein, 17 aa, Artificial Sequence
  Description of Artificial Sequence: Fibronectin peptide 4
FLTTTPNSLLVSWQAPR

SEQ ID NO: 836 - protein, 10 aa, Artificial Sequence
  Description of Artificial Sequence: Fibronectin peptide 5
FTNIGPDTMR

SEQ ID NO: 837 - protein, 15 aa, Artificial Sequence
  Description of Artificial Sequence: Fibronectin peptide 6
GGQPKQYNVGPLASK

SEQ ID NO: 838 - protein, 15 aa, Artificial Sequence
  Description of Artificial Sequence: Fibronectin peptide 7
GVTYNIIVEALQNQR

SEQ ID NO: 839 - protein, 16 aa, Artificial Sequence
  Description of Artificial Sequence: Fibronectin peptide 8
GVTYNIIVEALQNQRR

SEQ ID NO: 840 - protein, 16 aa, Artificial Sequence
  Description of Artificial Sequence: Fibronectin peptide 9
NLQPGSEYTATLVAVK

SEQ ID NO: 841 - protein, 11 aa, Artificial Sequence
  Description of Artificial Sequence: Fibronectin peptide 10
HHAEHSVGRPR

SEQ ID NO: 842 - protein, 12 aa, Artificial Sequence
  Description of Artificial Sequence: Fibronectin peptide 11
IAGYRLTAGLTR

SEQ ID NO: 843 - protein, 11 aa, Artificial Sequence
  Description of Artificial Sequence: Fibronectin peptide 12
IHLYTLNDNAR

SEQ ID NO: 844 - protein, 16 aa, Artificial Sequence
  Description of Artificial Sequence: Fibronectin peptide 13
ITGYIIKYEKPGSPPR

SEQ ID NO: 845 - protein, 21 aa, Artificial Sequence
  Description of Artificial Sequence: Fibronectin peptide 14
ITYGETGGNSPVQEFTVPGSK

SEQ ID NO: 846 - protein, 13 aa, Artificial Sequence
  Description of Artificial Sequence: Fibronectin peptide 15
LGVRPSQGGEAPR

SEQ ID NO: 847 - protein, 14 aa, Artificial Sequence
  Description of Artificial Sequence: Fibronectin peptide 16
  MOD_RES (14)..(14): Arg-carbamidomethyl oxidation-carbamidomethyl oxidation
LTCQCLGFGSGHFR

SEQ ID NO: 848 - protein, 18 aa, Artificial Sequence
  Description of Artificial Sequence: Fibronectin peptide 17
NTFAEITGLSPGVTYLFK

SEQ ID NO: 849 - protein, 14 aa, Artificial Sequence
  Description of Artificial Sequence: Fibronectin peptide 18
QYNVGPLASKYPLR

SEQ ID NO: 850 - protein, 19 aa, Artificial Sequence
  Description of Artificial Sequence: Fibronectin peptide 19
SSPVIIDASTAIDAPSNLR

SEQ ID NO: 851 - protein, 10 aa, Artificial Sequence
  Description of Artificial Sequence: Fibronectin peptide 20
STTPDITGYR

SEQ ID NO: 852 - protein, 24 aa, Artificial Sequence
  Description of Artificial Sequence: Fibronectin peptide 21
TKTETITGFQVDAIPANGQTPVQR

SEQ ID NO: 853 - protein, 14 aa, Artificial Sequence
  Description of Artificial Sequence: Fibronectin peptide 22
VTDATETTITISWR

SEQ ID NO: 854 - protein, 17 aa, Artificial Sequence
  Description of Artificial Sequence: Fibronectin peptide 23
VTWAPPPSIELTNLLVR

SEQ ID NO: 855 - protein, 12 aa, Artificial Sequence
  Description of Artificial Sequence: Fibronectin peptide 24
WLPSTSPVTGYR

SEQ ID NO: 856 - protein, 10 aa, Artificial Sequence
  Description of Artificial Sequence: Fibronectin peptide 25
TVLVTWTPPR

SEQ ID NO: 857 - protein, 9 aa, Artificial Sequence
  Description of Artificial Sequence: Fibronectin 1 peptide 1
APITGYIIR

SEQ ID NO: 858 - protein, 12 aa, Artificial Sequence
  Description of Artificial Sequence: Fibronectin 1 peptide 2
ATGVFTTLQPLR

SEQ ID NO: 859 - protein, 13 aa, Artificial Sequence
  Description of Artificial Sequence: Fibronectin 1 peptide 3
  MOD_RES (13)..(13): Arg-carbamidomethyl oxidation-carbamidomethyl oxidation
CDPIDQCQDSETR

SEQ ID NO: 860 - protein, 9 aa, Artificial Sequence
  Description of Artificial Sequence: Fibronectin 1 peptide 4
  MOD_RES (9)..(9): Lys-carbamidomethyl oxidation
CHEGGQSYK

SEQ ID NO: 861 - protein, 12 aa, Artificial Sequence
  Description of Artificial Sequence: Fibronectin 1 peptide 5
DGQERDAPIVNR

SEQ ID NO: 862 - protein, 18 aa, Artificial Sequence
  Description of Artificial Sequence: Fibronectin 1 peptide 6
  MOD_RES (18)..(18): Lys-carbamidomethyl oxidation
DQCIVDDITYNVNDTFHK

SEQ ID NO: 863 - protein, 16 aa, Artificial Sequence
  Description of Artificial Sequence: Fibronectin 1 peptide 7
  MOD_RES (16)..(16): Arg-carbamidomethyl oxidation-carbamidomethyl oxidation- carbamidomethyl oxidation
EYLGAICSCTCFGGQR

SEQ ID NO: 864 - protein, 17 aa, Artificial Sequence
  Description of Artificial Sequence: Fibronectin 1 peptide 8
FLTTTPNSLLVSWQAPR

SEQ ID NO: 865 - protein, 10 aa, Artificial Sequence
  Description of Artificial Sequence: Fibronectin 1 peptide 9
FTNIGPDTMR

SEQ ID NO: 866 - protein, 15 aa, Artificial Sequence
  Description of Artificial Sequence: Fibronectin 1 peptide 10
GDSPASSKPVSINYK

SEQ ID NO: 867 - protein, 12 aa, Artificial Sequence
  Description of Artificial Sequence: Fibronectin 1 peptide 11
  MOD_RES (12)..(12): Arg-carbamidomethyl oxidation
GEWACIPYSQLR

SEQ ID NO: 868 - protein, 18 aa, Artificial Sequence
  Description of Artificial Sequence: Fibronectin 1 peptide 12
  MOD_RES (18)..(18): Arg-carbamidomethyl oxidation
GGNSNGALCHFPFLYNNR

SEQ ID NO: 869 - protein, 15 aa, Artificial Sequence
  Description of Artificial Sequence: Fibronectin 1 peptide 13
GGQPKQYNVGPLASK

SEQ ID NO: 870 - protein, 21 aa, Artificial Sequence
  Description of Artificial Sequence: Fibronectin 1 peptide 14
GLTPGVIYEGQLISIQQYGHR

SEQ ID NO: 871 - protein, 13 aa, Artificial Sequence
  Description of Artificial Sequence: Fibronectin 1 peptide 15
  MOD_RES (13)..(13): Arg-carbamidomethyl oxidation-carbamidomethyl oxidation
GNLLQCVCTGNGR

SEQ ID NO: 872 - protein, 10 aa, Artificial Sequence
  Description of Artificial Sequence: Fibronectin 1 peptide 16
  MOD_RES (10)..(10): Arg-carbamidomethyl oxidation
GRISCTIANR

SEQ ID NO: 873 - protein, 15 aa, Artificial Sequence
  Description of Artificial Sequence: Fibronectin 1 peptide 17
GVTYNIIVEALQNQR

SEQ ID NO: 874 - protein, 16 aa, Artificial Sequence
  Description of Artificial Sequence: Fibronectin 1 peptide 18
GVTYNIIVEALQNQRR

SEQ ID NO: 875 - protein, 17 aa, Artificial Sequence
  Description of Artificial Sequence: Fibronectin 1 peptide 19
HALQSASAGSGSFTDVR

SEQ ID NO: 876 - protein, 11 aa, Artificial Sequence
  Description of Artificial Sequence: Fibronectin 1 peptide 20
HHAEHSVGRPR

SEQ ID NO: 877 - protein, 10 aa, Artificial Sequence
  Description of Artificial Sequence: Fibronectin 1 peptide 21
HYQINQQWER

SEQ ID NO: 878 - protein, 12 aa, Artificial Sequence
  Description of Artificial Sequence: Fibronectin 1 peptide 22
IAGYRLTAGLTR

SEQ ID NO: 879 - protein, 17 aa, Artificial Sequence
  Description of Artificial Sequence: Fibronectin 1 peptide 23
  MOD_RES (17)..(17): Methionin oxidation
IGDQWDKQHDLGHMMRM

SEQ ID NO: 880 - protein, 7 aa, Artificial Sequence
  Description of Artificial Sequence: Fibronectin 1 peptide 24
IGDTWSK

SEQ ID NO: 881 - protein, 7 aa, Artificial Sequence
  Description of Artificial Sequence: Fibronectin 1 peptide 25
IGEKWDR

SEQ ID NO: 882 - protein, 11 aa, Artificial Sequence
  Description of Artificial Sequence: Fibronectin 1 peptide 26
IHLYTLNDNAR

SEQ ID NO: 883 - protein, 8 aa, Artificial Sequence
  Description of Artificial Sequence: Fibronectin 1 peptide 27
  MOD_RES (8)..(8): Arg-carbamidomethyl oxidation
ISCTIANR

SEQ ID NO: 884 - protein, 16 aa, Artificial Sequence
  Description of Artificial Sequence: Fibronectin 1 peptide 28
ITGYIIKYEKPGSPPR

SEQ ID NO: 885 - protein, 21 aa, Artificial Sequence
  Description of Artificial Sequence: Fibronectin 1 peptide 29
ITYGETGGNSPVQEFTVPGSK

SEQ ID NO: 886 - protein, 13 aa, Artificial Sequence
  Description of Artificial Sequence: Fibronectin 1 peptide 30
LGVRPSQGGEAPR

SEQ ID NO: 887 - protein, 14 aa, Artificial Sequence
  Description of Artificial Sequence: Fibronectin 1 peptide 31
  MOD_RES (14)..(14): Arg-carbamidomethyl oxidation-carbamidomethyl oxidation
LTCQCLGFGSGHFR

SEQ ID NO: 888 - protein, 14 aa, Artificial Sequence
  Description of Artificial Sequence: Fibronectin 1 peptide 32
  MOD_RES (14)..(14): Lys-carbamidomethyl oxidation-carbamidomethyl oxidation
MSCTCLGNGKGEFK

SEQ ID NO: 889 - protein, 23 aa, Artificial Sequence
  Description of Artificial Sequence: Fibronectin 1 peptide 33
NLQPGSEYTVTLVAVKGNQQSPK

SEQ ID NO: 890 - protein, 9 aa, Artificial Sequence
  Description of Artificial Sequence: Fibronectin 1 peptide 34
  MOD_RES (9)..(9): Arg-carbamidomethyl oxidation
NRCNDQDTR

SEQ ID NO: 891 - protein, 18 aa, Artificial Sequence
  Description of Artificial Sequence: Fibronectin 1 peptide 35
NTFAEITGLSPGVTYLFK

SEQ ID NO: 892 - protein, 8 aa, Artificial Sequence
  Description of Artificial Sequence: Fibronectin 1 peptide 36
QDRVPPSR

SEQ ID NO: 893 - protein, 14 aa, Artificial Sequence
  Description of Artificial Sequence: Fibronectin 1 peptide 37
QYNVGPLASKYPLR

SEQ ID NO: 894 - protein, 23 aa, Artificial Sequence
  Description of Artificial Sequence: Fibronectin 1 peptide 38
RPGAAEPSPDGTTGHTYNQYTQR

SEQ ID NO: 895 - protein, 19 aa, Artificial Sequence
  Description of Artificial Sequence: Fibronectin 1 peptide 39
SDNVPPPTDLQFVELTDVK

SEQ ID NO: 896 - protein, 19 aa, Artificial Sequence
  Description of Artificial Sequence: Fibronectin 1 peptide 40
SSPVIIDASTAIDAPSNLR

SEQ ID NO: 897 - protein, 24 aa, Artificial Sequence
  Description of Artificial Sequence: Fibronectin 1 peptide 41
STATINNIKPGADYTITLYAVTGR

SEQ ID NO: 898 - protein, 10 aa, Artificial Sequence
  Description of Artificial Sequence: Fibronectin 1 peptide 42
STTPDITGYR

SEQ ID NO: 899 - protein, 11 aa, Artificial Sequence
  Description of Artificial Sequence: Fibronectin 1 peptide 43
TFYQIGDSWEK

SEQ ID NO: 900 - protein, 10 aa, Artificial Sequence
  Description of Artificial Sequence: Fibronectin 1 peptide 44
  MOD_RES (10)..(10): Arg-carbamidomethyl oxidation
TFYSCTTEGR

SEQ ID NO: 901 - protein, 24 aa, Artificial Sequence
  Description of Artificial Sequence: Fibronectin 1 peptide 45
TKTETITGFQVDAIPANGQTPVQR

SEQ ID NO: 902 - protein, 15 aa, Artificial Sequence
  Description of Artificial Sequence: Fibronectin 1 peptide 46
VEVLPVSLPGEHGQR

SEQ ID NO: 903 - protein, 8 aa, Artificial Sequence
  Description of Artificial Sequence: Fibronectin 1 peptide 47
VFAVHQGR

SEQ ID NO: 904 - protein, 14 aa, Artificial Sequence
  Description of Artificial Sequence: Fibronectin 1 peptide 48
VTDATETTITISWR

SEQ ID NO: 905 - protein, 17 aa, Artificial Sequence
  Description of Artificial Sequence: Fibronectin 1 peptide 49
VTWAPPPSIELTNLLVR

SEQ ID NO: 906 - protein, 10 aa, Artificial Sequence
  Description of Artificial Sequence: Fibronectin 1 peptide 50
  MOD_RES (10)..(10): Lys-carbamidomethyl oxidation
WCHDNGVNYK

SEQ ID NO: 907 - protein, 15 aa, Artificial Sequence
  Description of Artificial Sequence: Fibronectin 1 peptide 51
  MOD_RES (15)..(15): Arg-carbamidomethyl oxidation-carbamidomethyl oxidation
WKCDPIDQCQDSETR

SEQ ID NO: 908 - protein, 16 aa, Artificial Sequence
  Description of Artificial Sequence: Fibronectin 1 peptide 52
WKEATIPGHLNSYTIK

SEQ ID NO: 909 - protein, 12 aa, Artificial Sequence
  Description of Artificial Sequence: Fibronectin 1 peptide 53
WLPSTSPVTGYR

SEQ ID NO: 910 - protein, 12 aa, Artificial Sequence
  Description of Artificial Sequence: Fibronectin 1 peptide 54
WSRPQAPITGYR

SEQ ID NO: 911 - protein, 9 aa, Artificial Sequence
  Description of Artificial Sequence: Fibronectin 1 peptide 55
YEKPGSPPR

SEQ ID NO: 912 - protein, 13 aa, Artificial Sequence
  Description of Artificial Sequence: Fibronectin 1 peptide 56
YIVNVYQISEEGK

SEQ ID NO: 913 - protein, 14 aa, Artificial Sequence
  Description of Artificial Sequence: Fibronectin 1 peptide 57
  MOD_RES (14)..(14): Arg-carbamidomethyl oxidation
YSFCTDHAVLVQTR

SEQ ID NO: 914 - protein, 7 aa, Artificial Sequence
  Description of Artificial Sequence: Fibronectin 1 peptide 58
YTGNTYK

SEQ ID NO: 915 - protein, 11 aa, Artificial Sequence
  Description of Artificial Sequence: Gelsolin peptide 1
AGKEPGLQIWR

SEQ ID NO: 916 - protein, 20 aa, Artificial Sequence
  Description of Artificial Sequence: Gelsolin peptide 2
AVQHREVQGFESSTFSGYFK

SEQ ID NO: 917 - protein, 11 aa, Artificial Sequence
  Description of Artificial Sequence: Gelsolin peptide 3
DGGQTAPASIR

SEQ ID NO: 918 - protein, 22 aa, Artificial Sequence
  Description of Artificial Sequence: Gelsolin peptide 4
DPDQTDGPGLGYLSSHIANVER

SEQ ID NO: 919 - protein, 18 aa, Artificial Sequence
  Description of Artificial Sequence: Gelsolin peptide 5
EPAHLMSLFGGKPMIIYK

SEQ ID NO: 920 - protein, 15 aa, Artificial Sequence
  Description of Artificial Sequence: Gelsolin peptide 6
EVQGFESSTFSGYFK

SEQ ID NO: 921 - protein, 24 aa, Artificial Sequence
  Description of Artificial Sequence: Gelsolin peptide 7
FDLVPVPPNLYGDFFTGDAYVILK

SEQ ID NO: 922 - protein, 19 aa, Artificial Sequence
  Description of Artificial Sequence: Gelsolin peptide 8
GGVASGFKHVVPNEVVVQR

SEQ ID NO: 923 - protein, 11 aa, Artificial Sequence
  Description of Artificial Sequence: Gelsolin peptide 9
HVVPNEVVVQR

SEQ ID NO: 924 - protein, 30 aa, Artificial Sequence
  Description of Artificial Sequence: Gelsolin peptide 10
IEGSNKVPVDPATYGQFYGGDSYIILYNYR

SEQ ID NO: 925 - protein, 15 aa, Artificial Sequence
  Description of Artificial Sequence: Gelsolin peptide 11
  MOD_RES (15)..(15): Methionin oxidation-carbamidomethyl oxidation
MDAHPPRLFACSNRM

SEQ ID NO: 926 - protein, 25 aa, Artificial Sequence
  Description of Artificial Sequence: Gelsolin peptide 12
NWRDPDQTDGPGLGYLSSHIANVER

SEQ ID NO: 927 - protein, 21 aa, Artificial Sequence
  Description of Artificial Sequence: Gelsolin peptide 13
QTQVSVLPEGGETPLFKQFFK

SEQ ID NO: 928 - protein, 11 aa, Artificial Sequence
  Description of Artificial Sequence: Gelsolin peptide 14
  MOD_RES (11)..(11): Arg-carbamidomethyl oxidation
SEDCFILDHGR

SEQ ID NO: 929 - protein, 14 aa, Artificial Sequence
  Description of Artificial Sequence: Gelsolin peptide 15
  MOD_RES (14)..(14): Lys-carbamidomethyl oxidation
SEDCFILDHGRDGK

SEQ ID NO: 930 - protein, 13 aa, Artificial Sequence
  Description of Artificial Sequence: Gelsolin peptide 16
SGALNSNDAFVLK

SEQ ID NO: 931 - protein, 22 aa, Artificial Sequence
  Description of Artificial Sequence: Gelsolin peptide 17
SQHVQVEEGSEPDAFWEALGGK

SEQ ID NO: 932 - protein, 14 aa, Artificial Sequence
  Description of Artificial Sequence: Gelsolin peptide 18
  MOD_RES (14)..(14): Methionin oxidation
TASDFISKMQYPRM

SEQ ID NO: 933 - protein, 18 aa, Artificial Sequence
  Description of Artificial Sequence: Gelsolin peptide 19
TPSAAYLWVGAGASEAEK

SEQ ID NO: 934 - protein, 26 aa, Artificial Sequence
  Description of Artificial Sequence: Gelsolin peptide 20
TPSAAYLWVGAGASEAEKTGAQELLK

SEQ ID NO: 935 - protein, 27 aa, Artificial Sequence
  Description of Artificial Sequence: Gelsolin peptide 21
VEKFDLVPVPPNLYGDFFTGDAYVILK

SEQ ID NO: 936 - protein, 28 aa, Artificial Sequence
  Description of Artificial Sequence: Gelsolin peptide 22
VPFDAATLHTSTAMAAQHGMDDDGTGQK

SEQ ID NO: 937 - protein, 24 aa, Artificial Sequence
  Description of Artificial Sequence: Gelsolin peptide 23
VPVDPATYGQFYGGDSYIILYNYR

SEQ ID NO: 938 - protein, 18 aa, Artificial Sequence
  Description of Artificial Sequence: Gelsolin peptide 24
VSEARPSTMVVEHPEFLK

SEQ ID NO: 939 - protein, 25 aa, Artificial Sequence
  Description of Artificial Sequence: Gelsolin peptide 25
VSNGAGSMSVSLVADENPFAQGALR

SEQ ID NO: 940 - protein, 24 aa, Artificial Sequence
  Description of Artificial Sequence: Gelsolin peptide 26
  MOD_RES (24)..(24): Methionin oxidation
VVQGKEPAHLMSLFGGKPMIIYKM

SEQ ID NO: 941 - protein, 9 aa, Artificial Sequence
  Description of Artificial Sequence: Gelsolin peptide 27
YIETDPANR

SEQ ID NO: 942 - protein, 11 aa, Artificial Sequence
  Description of Artificial Sequence: Gelsolin peptide 28
YIETDPANRDR

SEQ ID NO: 943 - protein, 13 aa, Artificial Sequence
  Description of Artificial Sequence: Glutathione peroxidase 3 peptide 1
  MOD_RES (13)..(13): Methionin oxidation
FLVGPDGIPVMRM

SEQ ID NO: 944 - protein, 12 aa, Artificial Sequence
  Description of Artificial Sequence: Glutathione peroxidase 3 peptide 2
LFWEPMKIHDIR

SEQ ID NO: 945 - protein, 10 aa, Artificial Sequence
  Description of Artificial Sequence: Glutathione peroxidase 3 peptide 3
  MOD_RES (10)..(10): Methionin oxidation
MDILSYMRRM

SEQ ID NO: 946 - protein, 15 aa, Artificial Sequence
  Description of Artificial Sequence: Glutathione peroxidase 3 peptide 4
  MOD_RES (15)..(15): Arg-carbamidomethyl oxidation
NSCPPTAELLGSPGR

SEQ ID NO: 947 - protein, 14 aa, Artificial Sequence
  Description of Artificial Sequence: Glutathione peroxidase 3 peptide 5
QEPGENSEILPSLK

SEQ ID NO: 948 - protein, 16 aa, Artificial Sequence
  Description of Artificial Sequence: Glutathione peroxidase 3 peptide 6
  MOD_RES (16)..(16): Methionin oxidation
TTVSNVKMDILSYMRM

SEQ ID NO: 949 - protein, 18 aa, Artificial Sequence
  Description of Artificial Sequence: Glutathione peroxidase 3 peptide 7
  MOD_RES (18)..(18): Methionin oxidation
WNFEKFLVGPDGIPVMRM

SEQ ID NO: 950 - protein, 17 aa, Artificial Sequence
  Description of Artificial Sequence: Glutathione peroxidase 3 peptide 8
YVRPGGGFVPNFQLFEK

SEQ ID NO: 951 - protein, 24 aa, Artificial Sequence
  Description of Artificial Sequence: Glutathione peroxidase 3 peptide 9
YVRPGGGFVPNFQLFEKGDVNGEK

SEQ ID NO: 952 - protein, 13 aa, Artificial Sequence
  Description of Artificial Sequence: Gpld1 protein peptide 1
AQYVLTSPEASSR

SEQ ID NO: 953 - protein, 11 aa, Artificial Sequence
  Description of Artificial Sequence: Gpld1 protein peptide 2
GIVATFYSHPR

SEQ ID NO: 954 - protein, 9 aa, Artificial Sequence
  Description of Artificial Sequence: Gpld1 protein peptide 3
GKYHDVSER

SEQ ID NO: 955 - protein, 11 aa, Artificial Sequence
  Description of Artificial Sequence: Gpld1 protein peptide 4
GRNQVVVAAGR

SEQ ID NO: 956 - protein, 9 aa, Artificial Sequence
  Description of Artificial Sequence: Gpld1 protein peptide 5
IYDNLYGRK

SEQ ID NO: 957 - protein, 11 aa, Artificial Sequence
  Description of Artificial Sequence: Gpld1 protein peptide 6
LGTSLSSGYVR

SEQ ID NO: 958 - protein, 13 aa, Artificial Sequence
  Description of Artificial Sequence: Gpld1 protein peptide 7
LSGALHVYSFSSD

SEQ ID NO: 959 - protein, 14 aa, Artificial Sequence
  Description of Artificial Sequence: Gpld1 protein peptide 8
  MOD_RES (14)..(14): Methionin oxidation
NDFHRNLTMFISRM

SEQ ID NO: 960 - protein, 13 aa, Artificial Sequence
  Description of Artificial Sequence: Gpld1 protein peptide 9
  MOD_RES (13)..(13): Methionin oxidation
NLRLMLAGSSQKM

SEQ ID NO: 961 - protein, 11 aa, Artificial Sequence
  Description of Artificial Sequence: Gpld1 protein peptide 10
NLTMFISRDIR

SEQ ID NO: 962 - protein, 13 aa, Artificial Sequence
  Description of Artificial Sequence: Gpld1 protein peptide 11
SLGKVYGYFLPNR

SEQ ID NO: 963 - protein, 19 aa, Artificial Sequence
  Description of Artificial Sequence: Gpld1 protein peptide 12
SSWGARLSGALHVYSFSSD

SEQ ID NO: 964 - protein, 14 aa, Artificial Sequence
  Description of Artificial Sequence: Gpld1 protein peptide 13
TQPALLSTFSGDRR

SEQ ID NO: 965 - protein, 9 aa, Artificial Sequence
  Description of Artificial Sequence: Gpld1 protein peptide 14
VYGYFLPNR

SEQ ID NO: 966 - protein, 10 aa, Artificial Sequence
  Description of Artificial Sequence: Gpld1 protein peptide 15
WYVPVRDLLR

SEQ ID NO: 967 - protein, 22 aa, Artificial Sequence
  Description of Artificial Sequence: Gpld1 protein peptide 16
YHDVSERTHWTPFLNASIHYIR

SEQ ID NO: 968 - protein, 21 aa, Artificial Sequence
  Description of Artificial Sequence: GRS protein peptide 1
  MOD_RES (21)..(21): Lys-carbamidomethyl oxidation
LAQDYLQCVLQIPQPGSGPSK

SEQ ID NO: 969 - protein, 12 aa, Artificial Sequence
  Description of Artificial Sequence: GRS protein peptide 2
QNGGWENGFVKK

SEQ ID NO: 970 - protein, 21 aa, Artificial Sequence
  Description of Artificial Sequence: GRS protein peptide 3
  MOD_RES (21)..(21): Lys-carbamidomethyl oxidation
SGWMTFLEVTGKICEMLSLLK

SEQ ID NO: 971 - protein, 9 aa, Artificial Sequence
  Description of Artificial Sequence: GRS protein peptide 4
TLFTQVMEK

SEQ ID NO: 972 - protein, 15 aa, Artificial Sequence
  Description of Artificial Sequence: GRS protein peptide 5
VLQNVAFSVQKEVEK

SEQ ID NO: 973 - protein, 9 aa, Artificial Sequence
  Description of Artificial Sequence: GUGU alpha peptide 1
AMFHINKPR

SEQ ID NO: 974 - protein, 10 aa, Artificial Sequence
  Description of Artificial Sequence: GUGU alpha peptide 2
AMFHINKPRR

SEQ ID NO: 975 - protein, 18 aa, Artificial Sequence
  Description of Artificial Sequence: GUGU alpha peptide 3
AMNQWVSGPAYYVEYLIK

SEQ ID NO: 976 - protein, 10 aa, Artificial Sequence
  Description of Artificial Sequence: GUGU alpha peptide 4
  MOD_RES (10)..(10): Methionin oxidation
DGYMLSLNRM

SEQ ID NO: 977 - protein, 12 aa, Artificial Sequence
  Description of Artificial Sequence: GUGU alpha peptide 5
DQKDGYMLSLNR

SEQ ID NO: 978 - protein, 28 aa, Artificial Sequence
  Description of Artificial Sequence: GUGU alpha peptide 6
  MOD_RES (28)..(28): Methionin oxidation-carbamidomethyl oxidation
EHYQEDMGSLFYLTLDVLETDCHVLSRM

SEQ ID NO: 979 - protein, 18 aa, Artificial Sequence
  Description of Artificial Sequence: GUGU alpha peptide 7
GSIQHLPELDDEKPEESK

SEQ ID NO: 980 - protein, 10 aa, Artificial Sequence
  Description of Artificial Sequence: GUGU alpha peptide 8
HVPLIQPVEK

SEQ ID NO: 981 - protein, 9 aa, Artificial Sequence
  Description of Artificial Sequence: GUGU alpha peptide 9
ISAFDRFGR

SEQ ID NO: 982 - protein, 30 aa, Artificial Sequence
  Description of Artificial Sequence: GUGU alpha peptide 10
  MOD_RES (30)..(30): Lys-carbamidomethyl oxidation-carbamidomethyl oxidation
KTHTTCPDCPSPIDLSNPSALEAATESLAK

SEQ ID NO: 983 - protein, 12 aa, Artificial Sequence
  Description of Artificial Sequence: GUGU alpha peptide 11
LVVLPFPGKEQR

SEQ ID NO: 984 - protein, 11 aa, Artificial Sequence
  Description of Artificial Sequence: GUGU alpha peptide 12
  MOD_RES (11)..(11): Lys-carbamidomethyl oxidation
MFYESVYGQCK

SEQ ID NO: 985 - protein, 10 aa, Artificial Sequence
  Description of Artificial Sequence: GUGU alpha peptide 13
MISAFDRFGR

SEQ ID NO: 986 - protein, 18 aa, Artificial Sequence
  Description of Artificial Sequence: GUGU alpha peptide 14
  MOD_RES (18)..(18): Pro-carbamidomethyl oxidation
SAECPGPEKENNPLVLPP

SEQ ID NO: 987 - protein, 28 aa, Artificial Sequence
  Description of Artificial Sequence: GUGU alpha peptide 15
  MOD_RES (28)..(28): Arg-carbamidomethyl oxidation-carbamidomethyl oxidation
SQASCSLQHSDSEPVGICQGSTVQSSLR

SEQ ID NO: 988 - protein, 29 aa, Artificial Sequence
  Description of Artificial Sequence: GUGU alpha peptide 16
  MOD_RES (29)..(29): Lys-carbamidomethyl oxidation-carbamidomethyl oxidation
THTTCPDCPSPIDLSNPSALEAATESLAK

SEQ ID NO: 989 - protein, 9 aa, Artificial Sequence
  Description of Artificial Sequence: Hemopexin peptide 1
  MOD_RES (9)..(9): Arg-carbamidomethyl oxidation
DYFVSCPGR

SEQ ID NO: 990 - protein, 24 aa, Artificial Sequence
  Description of Artificial Sequence: Hemopexin peptide 2
  MOD_RES (24)..(24): Arg-carbamidomethyl oxidation
ELGSPPGISLETIDAAFSCPGSSR

SEQ ID NO: 991 - protein, 11 aa, Artificial Sequence
  Description of Artificial Sequence: Hemopexin peptide 3
FNPVTGEVPPR

SEQ ID NO: 992 - protein, 17 aa, Artificial Sequence
  Description of Artificial Sequence: Hemopexin peptide 4
FNPVTGEVPPRYPLDAR

SEQ ID NO: 993 - protein, 13 aa, Artificial Sequence
  Description of Artificial Sequence: Hemopexin peptide 5
GATYAFTGSHYWR

SEQ ID NO: 994 - protein, 15 aa, Artificial Sequence
  Description of Artificial Sequence: Hemopexin peptide 6
  MOD_RES (15)..(15): Arg-carbamidomethyl oxidation
GECQSEGVLFFQGNR

SEQ ID NO: 995 - protein, 16 aa, Artificial Sequence
  Description of Artificial Sequence: Hemopexin peptide 7
  MOD_RES (16)..(16): Lys-carbamidomethyl oxidation
GECQSEGVLFFQGNRK

SEQ ID NO: 996 - protein, 11 aa, Artificial Sequence
  Description of Artificial Sequence: Hemopexin peptide 8
GGNNLVSGYPK

SEQ ID NO: 997 - protein, 9 aa, Artificial Sequence
  Description of Artificial Sequence: Hemopexin peptide 9
GPDSVFLIK

SEQ ID NO: 998 - protein, 21 aa, Artificial Sequence
  Description of Artificial Sequence: Hemopexin peptide 10
  MOD_RES (21)..(21): Arg-carbamidomethyl oxidation
LFQEEFPGIPYPPDAAVECHR

SEQ ID NO: 999 - protein, 7 aa, Artificial Sequence
  Description of Artificial Sequence: Hemopexin peptide 11
LWWLDLK

SEQ ID NO: 1000 - protein, 8 aa, Artificial Sequence
  Description of Artificial Sequence: Hemopexin peptide 12
LYVSSGRR

SEQ ID NO: 1001 - protein, 8 aa, Artificial Sequence
  Description of Artificial Sequence: Hemopexin peptide 13
RLWWLDLK

SEQ ID NO: 1002 - protein, 16 aa, Artificial Sequence
  Description of Artificial Sequence: Hemopexin peptide 14
SGAQATWTEVSWPHEK

SEQ ID NO: 1003 - protein, 25 aa, Artificial Sequence
  Description of Artificial Sequence: Hemopexin peptide 15
  MOD_RES (25)..(25): Lys-carbamidomethyl oxidation
SGAQATWTEVSWPHEKVDGALCLDK

SEQ ID NO: 1004 - protein, 35 aa, Artificial Sequence
  Description of Artificial Sequence: Hemopexin peptide 16
  MOD_RES (35)..(35): Lys-carbamidomethyl oxidation-carbamidomethyl oxidation
SLGPNTCSSNGSSLYFIHGPNLYCYSSIDKLNAAK

SEQ ID NO: 1005 - protein, 16 aa, Artificial Sequence
  Description of Artificial Sequence: Hemopexin peptide 17
  MOD_RES (16)..(16): Gln-carbamidomethyl oxidation
SLPQPQKVNSILGCSQ

SEQ ID NO: 1006 - protein, 9 aa, Artificial Sequence
  Description of Artificial Sequence: Hemopexin peptide 18
VWVYPPEKK

SEQ ID NO: 1007 - protein, 8 aa, Artificial Sequence
  Description of Artificial Sequence: Hemopexin peptide 19
WFWDFATR

SEQ ID NO: 1008 - protein, 13 aa, Artificial Sequence
  Description of Artificial Sequence: Hemopexin peptide 20
WKNPITSVDAAFR

SEQ ID NO: 1009 - protein, 12 aa, Artificial Sequence
  Description of Artificial Sequence: Hemopexin peptide 21
  MOD_RES (12)..(12): Lys-carbamidomethyl oxidation
WLERYYCFQGNK

SEQ ID NO: 1010 - protein, 8 aa, Artificial Sequence
  Description of Artificial Sequence: Hemopexin peptide 22
  MOD_RES (8)..(8): Lys-carbamidomethyl oxidation
YYCFQGNK

SEQ ID NO: 1011 - protein, 11 aa, Artificial Sequence
  Description of Artificial Sequence: Hemopexin peptide 23
  MOD_RES (11)..(11): Arg-carbamidomethyl oxidation
YYCFQGNKFLR

SEQ ID NO: 1012 - protein, 18 aa, Artificial Sequence
  Description of Artificial Sequence: High molecular weight kininogen I isoform DeltaD5 peptide 1
ATSQVVAGTKYVIEFIAR

SEQ ID NO: 1013 - protein, 24 aa, Artificial Sequence
  Description of Artificial Sequence: High molecular weight kininogen I isoform DeltaD5 peptide 2
  MOD_RES (24)..(24): Lys-carbamidomethyl oxidation-carbamidomethyl oxidation
AYFPCIGCVHAISTDSPDLEPVLK

SEQ ID NO: 1014 - protein, 12 aa, Artificial Sequence
  Description of Artificial Sequence: High molecular weight kininogen I isoform DeltaD5 peptide 3
  MOD_RES (12)..(12): Methionin oxidation-carbamidomethyl oxidation
CQALDMTEMARM

SEQ ID NO: 1015 - protein, 12 aa, Artificial Sequence
  Description of Artificial Sequence: High molecular weight kininogen I isoform DeltaD5 peptide 4
  MOD_RES (12)..(12): Lys-carbamidomethyl oxidation
ENEFFIVTQTCK

SEQ ID NO: 1016 - protein, 20 aa, Artificial Sequence
  Description of Artificial Sequence: High molecular weight kininogen I isoform DeltaD5 peptide 5
  MOD_RES (20)..(20): Arg-carbamidomethyl oxidation-carbamidomethyl oxidation
FPSLHGDCVALPNGDDGECR

SEQ ID NO: 1017 - protein, 12 aa, Artificial Sequence
  Description of Artificial Sequence: High molecular weight kininogen I isoform DeltaD5 peptide 6
LISDFPEATSPK

SEQ ID NO: 1018 - protein, 13 aa, Artificial Sequence
  Description of Artificial Sequence: High molecular weight kininogen I isoform DeltaD5 peptide 7
  MOD_RES (13)..(13): Lys-carbamidomethyl oxidation
RENEFFIVTQTCK

SEQ ID NO: 1019 - protein, 9 aa, Artificial Sequence
  Description of Artificial Sequence: High molecular weight kininogen I isoform DeltaD5 peptide 8
RPPGFSPFR

SEQ ID NO: 1020 - protein, 9 aa, Artificial Sequence
  Description of Artificial Sequence: High molecular weight kininogen I isoform DeltaD5 peptide 9
SGNQYMLHR

SEQ ID NO: 1021 - protein, 11 aa, Artificial Sequence
  Description of Artificial Sequence: High molecular weight kininogen I isoform DeltaD5 peptide 10
TDGSPTFYSFK

SEQ ID NO: 1022 - protein, 17 aa, Artificial Sequence
  Description of Artificial Sequence: High molecular weight kininogen I isoform DeltaD5 peptide 11
VIEGTKTDGSPTFYSFK

SEQ ID NO: 1023 - protein, 18 aa, Artificial Sequence
  Description of Artificial Sequence: HMW-kininogen-II variant peptide 1
  MOD_RES (18)..(18): Methionin oxidation
AKMDGSATFYSFNYQIKM

SEQ ID NO: 1024 - protein, 18 aa, Artificial Sequence
  Description of Artificial Sequence: HMW-kininogen-II variant peptide 2
ATSQVVAGTNYVIEFIAR

SEQ ID NO: 1025 - protein, 11 aa, Artificial Sequence
  Description of Artificial Sequence: HMW-kininogen-II variant peptide 3
  MOD_RES (11)..(11): Arg-carbamidomethyl oxidation
CQALDKTIPIR

SEQ ID NO: 1026 - protein, 18 aa, Artificial Sequence
  Description of Artificial Sequence: HMW-kininogen-II variant peptide 4
  MOD_RES (18)..(18): Lys-carbamidomethyl oxidation-carbamidomethyl oxidation
EGNCSAQRGLAWQDCDFK

SEQ ID NO: 1027 - protein, 12 aa, Artificial Sequence
  Description of Artificial Sequence: HMW-kininogen-II variant peptide 5
  MOD_RES (12)..(12): Lys-carbamidomethyl oxidation
ENKFFIVTQTCK

SEQ ID NO: 1028 - protein, 9 aa, Artificial Sequence
  Description of Artificial Sequence: HMW-kininogen-II variant peptide 6
  MOD_RES (9)..(9): Lys-carbamidomethyl oxidation
FFIVTQTCK

SEQ ID NO: 1029 - protein, 15 aa, Artificial Sequence
  Description of Artificial Sequence: HMW-kininogen-II variant peptide 7
  MOD_RES (15)..(15): Arg-carbamidomethyl oxidation-carbamidomethyl oxidation
GDCVALPNGDGGECR

SEQ ID NO: 1030 - protein, 19 aa, Artificial Sequence
  Description of Artificial Sequence: HMW-kininogen-II variant peptide 8
KATSQVVAGTNYVIEFIAR

SEQ ID NO: 1031 - protein, 16 aa, Artificial Sequence
  Description of Artificial Sequence: HMW-kininogen-II variant peptide 9
  MOD_RES (16)..(16): Methionin oxidation
MDGSATFYSFNYQIKM

SEQ ID NO: 1032 - protein, 17 aa, Artificial Sequence
  Description of Artificial Sequence: HMW-kininogen-II variant peptide 10
QLPRNVLGAHGSQLAGR

SEQ ID NO: 1033 - protein, 9 aa, Artificial Sequence
  Description of Artificial Sequence: HMW-kininogen-II variant peptide 11
RPPGFSPFR

SEQ ID NO: 1034 - protein, 10 aa, Artificial Sequence
  Description of Artificial Sequence: HMW-kininogen-II variant peptide 12
RRPPGFSPFR

SEQ ID NO: 1035 - protein, 15 aa, Artificial Sequence
  Description of Artificial Sequence: Ig (A Chain A, Crystal Structure Of Fab Fragment Of Antibody Hyhel-26 Complexed With Lysozyme) peptide 1
ASQSISNNLHWYQQK

SEQ ID NO: 1036 - protein, 24 aa, Artificial Sequence
  Description of Artificial Sequence: Ig (A Chain A, Crystal Structure Of Fab Fragment Of Antibody Hyhel-26 Complexed With Lysozyme) peptide 2
  MOD_RES (24)..(24): Arg-carbamidomethyl oxidation
DIVLTQSPATLSVTPGDSVSLSCR

SEQ ID NO: 1037 - protein, 19 aa, Artificial Sequence
  Description of Artificial Sequence: Ig (A Chain A, Crystal Structure Of Fab Fragment Of Antibody Hyhel-26 Complexed With Lysozyme) peptide 3
DSTYSMSSTLTLTKDEYER

SEQ ID NO: 1038 - protein, 11 aa, Artificial Sequence
  Description of Artificial Sequence: Ig (A Chain A, Crystal Structure Of Fab Fragment Of Antibody Hyhel-26 Complexed With Lysozyme) peptide 4
  MOD_RES (11)..(11): Lys-carbamidomethyl oxidation
HNSYTCEATHK

SEQ ID NO: 1039 - protein, 14 aa, Artificial Sequence
  Description of Artificial Sequence: Ig (A Chain A, Crystal Structure Of Fab Fragment Of Antibody Hyhel-26 Complexed With Lysozyme) peptide 5
QNGVLNSWTDQDSK

SEQ ID NO: 1040 - protein, 12 aa, Artificial Sequence
  Description of Artificial Sequence: Ig (A Chain A, Crystal Structure Of Fab Fragment Of Antibody Hyhel-26 Complexed With Lysozyme) peptide 6
YASQSISGIPSR

SEQ ID NO: 1041 - protein, 15 aa, Artificial Sequence
  Description of Artificial Sequence: Ig (A Chain A, Idiotope-Anti-Idiotope Fab-Fab Complex) peptide 1
IAVAWYQQKPGQSPK

SEQ ID NO: 1042 - protein, 20 aa, Artificial Sequence
  Description of Artificial Sequence: Ig (A Chain A, Idiotope-Anti-Idiotope Fab-Fab Complex) peptide 2
  MOD_RES (20)..(20): Methionin oxidation
DSTYSMSSTLTLTKDEYERM

SEQ ID NO: 1043 - protein, 15 aa, Artificial Sequence
  Description of Artificial Sequence: Ig (A Chain A, Idiotope-Anti-Idiotope Fab-Fab Complex) peptide 3
  MOD_RES (15)..(15): Lys-carbamidomethyl oxidation
FMSTSVGDRVSITCK

SEQ ID NO: 1044 - protein, 11 aa, Artificial Sequence
  Description of Artificial Sequence: Ig (A Chain A, Idiotope-Anti-Idiotope Fab-Fab Complex) peptide 4
  MOD_RES (11)..(11): Lys-carbamidomethyl oxidation
HNSYTCEATHK

SEQ ID NO: 1045 - protein, 9 aa, Artificial Sequence
  Description of Artificial Sequence: Ig (A Chain A, Idiotope-Anti-Idiotope Fab-Fab Complex) peptide 5
LLIYWASTR

SEQ ID NO: 1046 - protein, 14 aa, Artificial Sequence
  Description of Artificial Sequence: Ig (A Chain A, Idiotope-Anti-Idiotope Fab-Fab Complex) peptide 6
QNGVLDSWTDQDSK

SEQ ID NO: 1047 - protein, 12 aa, Artificial Sequence
  Description of Artificial Sequence: Ig (A Chain A, Idiotope-Anti-Idiotope Fab-Fab Complex) peptide 7
  MOD_RES (12)..(12): Arg-carbamidomethyl oxidation
VSITCKASQDVR

SEQ ID NO: 1048 - protein, 18 aa, Artificial Sequence
  Description of Artificial Sequence: Ig (A Chain A, Lyme Disease Antigen Ospa In Complex With Neutralizing Antibody Fab La-2) peptide 1
ASQDINKYIAWYQHKPGK

SEQ ID NO: 1049 - protein, 20 aa, Artificial Sequence
  Description of Artificial Sequence: Ig (A Chain A, Lyme Disease Antigen Ospa In Complex With Neutralizing Antibody Fab La-2) peptide 2
  MOD_RES (20)..(20): Methionin oxidation
DSTYSMSSTLTLTKDEYERM

SEQ ID NO: 1050 - protein, 11 aa, Artificial Sequence
  Description of Artificial Sequence: Ig (A Chain A, Lyme Disease Antigen Ospa In Complex With Neutralizing Antibody Fab La-2) peptide 3
  MOD_RES (11)..(11): Lys-carbamidomethyl oxidation
HNSYTCEATHK

SEQ ID NO: 1051 - protein, 19 aa, Artificial Sequence
  Description of Artificial Sequence: Ig (A Chain A, Lyme Disease Antigen Ospa In Complex With Neutralizing Antibody Fab La-2) peptide 4
  MOD_RES (19)..(19): Lys-carbamidomethyl oxidation
HNSYTCEATHKTSTSPIVK

SEQ ID NO: 1052 - protein, 14 aa, Artificial Sequence
  Description of Artificial Sequence: Ig (A Chain A, Lyme Disease Antigen Ospa In Complex With Neutralizing Antibody Fab La-2) peptide 5
QNGVLNSWTDQDSK

SEQ ID NO: 1053 - protein, 35 aa, Artificial Sequence; identical to SEQ ID NO: 260
  Description of Artificial Sequence: Ig (A Chain A, Lyme Disease Antigen Ospa In Complex With Neutralizing Antibody Fab La-2) peptide 6
  MOD_RES (35)..(35): Lys-carbamidomethyl oxidation

SEQ ID NO: 1054 - protein, 11 aa, Artificial Sequence
  Description of Artificial Sequence: Ig (A Chain A, Lyme Disease Antigen Ospa In Complex With Neutralizing Antibody Fab La-2) peptide 7
YIAWYQHKPGK

SEQ ID NO: 1055 - protein, 19 aa, Artificial Sequence
  Description of Artificial Sequence: Ig (A Chain A, S25-2- Kdo Monosaccharide Complex) peptide 1
  MOD_RES (19)..(19): Methionin oxidation
DIVMSQSPSSLAVSAGEKM

SEQ ID NO: 1056 - protein, 20 aa, Artificial Sequence
  Description of Artificial Sequence: Ig (A Chain A, S25-2- Kdo Monosaccharide Complex) peptide 2
  MOD_RES (20)..(20): Methionin oxidation
DSTYSMSSTLTLTKDEYERM

SEQ ID NO: 1057 - protein, 11 aa, Artificial Sequence
  Description of Artificial Sequence: Ig (A Chain A, S25-2- Kdo Monosaccharide Complex) peptide 3
  MOD_RES (11)..(11): Lys-carbamidomethyl oxidation
HNSYTCEATHK

SEQ ID NO: 1058 - protein, 9 aa, Artificial Sequence
  Description of Artificial Sequence: Ig (A Chain A, S25-2- Kdo Monosaccharide Complex) peptide 4
LLIYWASTR

SEQ ID NO: 1059 - protein, 15 aa, Artificial Sequence
  Description of Artificial Sequence: Ig (A Chain A, S25-2- Kdo Monosaccharide Complex) peptide 5
NYLAWYQQKPGQSPK

SEQ ID NO: 1060 - protein, 14 aa, Artificial Sequence
  Description of Artificial Sequence: Ig (A Chain A, S25-2- Kdo Monosaccharide Complex) peptide 6
QNGVLNSWTDQDSK

SEQ ID NO: 1061 - protein, 12 aa, Artificial Sequence
  Description of Artificial Sequence: Ig (A Chain A, S25-2- Kdo Monosaccharide Complex) peptide 7
TSTSPIVKSFNR

SEQ ID NO: 1062 - protein, 34 aa, Artificial Sequence; identical to SEQ ID NO: 256
  Description of Artificial Sequence: Ig (A Chain A, Structure Of An Activity Suppressing Fab Fragment To Cytochrome P450 Aromatase) peptide 1
  MOD_RES (34)..(34): Lys-carbamidomethyl oxidation

SEQ ID NO: 1063 - protein, 18 aa, Artificial Sequence
  Description of Artificial Sequence: Ig (A Chain A, Structure Of An Activity Suppressing Fab Fragment To Cytochrome P450 Aromatase) 2
DIVLTQSPASLAVSLGQR

SEQ ID NO: 1064 - protein, 24 aa, Artificial Sequence
  Description of Artificial Sequence: Ig (A Chain A, Structure Of An Activity Suppressing Fab Fragment To Cytochrome P450 Aromatase) 3
  MOD_RES (24)..(24): Arg-carbamidomethyl oxidation
DIVLTQSPASLAVSLGQRATISCR

SEQ ID NO: 1065 - protein, 11 aa, Artificial Sequence
  Description of Artificial Sequence: Ig (A Chain A, Structure Of An Activity Suppressing Fab Fragment To Cytochrome P450 Aromatase) 4
  MOD_RES (11)..(11): Lys-carbamidomethyl oxidation
HNSYTCEATHK

SEQ ID NO: 1066 - protein, 19 aa, Artificial Sequence
  Description of Artificial Sequence: Ig (A Chain A, Structure Of An Activity Suppressing Fab Fragment To Cytochrome P450 Aromatase) 5
  MOD_RES (19)..(19): Lys-carbamidomethyl oxidation
HNSYTCEATHKTSTSPIVK

SEQ ID NO: 1067 - protein, 16 aa, Artificial Sequence
  Description of Artificial Sequence: Ig (A Chain A, Structure Of An Activity Suppressing Fab Fragment To Cytochrome P450 Aromatase) 6
LLIYLVSNLESGVPAR

SEQ ID NO: 1068 - protein, 11 aa, Artificial Sequence
  Description of Artificial Sequence: Ig (antibody variable domain) peptide 1
DFQPGYNTGLK

SEQ ID NO: 1069 - protein, 13 aa, Artificial Sequence
  Description of Artificial Sequence: Ig (antibody variable domain) peptide 2
FTISKTSTTVDLK

SEQ ID NO: 1070 - protein, 21 aa, Artificial Sequence
  Description of Artificial Sequence: Ig (antibody variable domain) peptide 3
GLEYIGFINPRGTPYYASWAK

SEQ ID NO: 1071 - protein, 10 aa, Artificial Sequence
  Description of Artificial Sequence: Ig (antibody variable domain) peptide 4
GTPYYASWAK

SEQ ID NO: 1072 - protein, 12 aa, Artificial Sequence
  Description of Artificial Sequence: Ig (antibody variable domain) peptide 5
IWGPGTLVTVSS

SEQ ID NO: 1073 - protein, 15 aa, Artificial Sequence
  Description of Artificial Sequence: Ig (Anti-DNA immunoglobulin light chain IgG) peptide 1
ASQSISDYLHWYQQK

SEQ ID NO: 1074 - protein, 21 aa, Artificial Sequence
  Description of Artificial Sequence: Ig (Anti-DNA immunoglobulin light chain IgG) peptide 2
ASQSISDYLHWYQQKSHESPR

SEQ ID NO: 1075 - protein, 19 aa, Artificial Sequence
  Description of Artificial Sequence: Ig (Anti-DNA immunoglobulin light chain IgG) peptide 3
  MOD_RES (19)..(19): Methionin oxidation
DIVMTQSPATLSVTPGDRM

SEQ ID NO: 1076 - protein, 25 aa, Artificial Sequence
  Description of Artificial Sequence: Ig (Anti-DNA immunoglobulin light chain IgG) peptide 4
  MOD_RES (25)..(25): Methionin oxidation-carbamidomethyl oxidation
DIVMTQSPATLSVTPGDRVSLSCRM

SEQ ID NO: 1077 - protein, 16 aa, Artificial Sequence
  Description of Artificial Sequence: Ig (Anti-DNA immunoglobulin light chain IgG) peptide 5
LLIKYASQSISGIPSR

SEQ ID NO: 1078 - protein, 12 aa, Artificial Sequence
  Description of Artificial Sequence: Ig (Anti-DNA immunoglobulin light chain IgG) peptide 6
YASQSISGIPSR

SEQ ID NO: 1079 - protein, 34 aa, Artificial Sequence; identical to SEQ ID NO: 256
  Description of Artificial Sequence: Ig (anti-human apolipoprotein A monoclonal antibody mAb(a)23L kappa light chain) peptide 1
  MOD_RES (34)..(34): Lys-carbamidomethyl oxidation

SEQ ID NO: 1080 - protein, 11 aa, Artificial Sequence
  Description of Artificial Sequence: Ig (anti-human apolipoprotein A monoclonal antibody mAb(a)23L kappa light chain) peptide 2
  MOD_RES (11)..(11): Lys-carbamidomethyl oxidation
HNSYTCEATHK

SEQ ID NO: 1081 - protein, 19 aa, Artificial Sequence
  Description of Artificial Sequence: Ig (anti-human apolipoprotein A monoclonal antibody mAb(a)23L kappa light chain) peptide 3
  MOD_RES (19)..(19): Lys-carbamidomethyl oxidation
HNSYTCEATHKTSTSPIVK

SEQ ID NO: 1082 - protein, 16 aa, Artificial Sequence
  Description of Artificial Sequence: Ig (anti-human apolipoprotein A monoclonal antibody mAb(a)23L kappa light chain) peptide 4
LLIHYTSTLQPGIPSR

SEQ ID NO: 1083 - protein, 35 aa, Artificial Sequence; identical to SEQ ID NO: 260
  Description of Artificial Sequence: Ig (anti-human apolipoprotein A monoclonal antibody mAb(a)23L kappa light chain) peptide 5
  MOD_RES (35)..(35): Lys-carbamidomethyl oxidation

SEQ ID NO: 1084 - protein, 11 aa, Artificial Sequence
  Description of Artificial Sequence: Ig (anti-human apolipoprotein A monoclonal antibody mAb(a)23L kappa light chain) peptide 6
TFGGGTKLEIK

SEQ ID NO: 1085 - protein, 14 aa, Artificial Sequence
  Description of Artificial Sequence: Ig (anti-human apolipoprotein A monoclonal antibody mAb(a)23L kappa light chain) peptide 7
YIAWYQHKPGKGPR

SEQ ID NO: 1086 - protein, 19 aa, Artificial Sequence
  Description of Artificial Sequence: Ig (C Chain C, Fab (Igg2a,Kappa) Fragment (26-10) Complex With Digoxin) peptide 1
DSTYSMSSTLTLTKDEYER

SEQ ID NO: 1087 - protein, 24 aa, Artificial Sequence
  Description of Artificial Sequence: Ig (C Chain C, Fab (Igg2a,Kappa) Fragment (26-10) Complex With Digoxin) peptide 2
  MOD_RES (24)..(24): Arg-carbamidomethyl oxidation
DVVMTQTPLSLPVSLGDQASISCR

SEQ ID NO: 1088 - protein, 13 aa, Artificial Sequence
  Description of Artificial Sequence: Ig (C Chain C, Fab (Igg2a,Kappa) Fragment (26-10) Complex With Digoxin) peptide 3
FSGSGSGTDFTLK

SEQ ID NO: 1089 - protein, 20 aa, Artificial Sequence
  Description of Artificial Sequence: Ig (C Chain C, Fab (Igg2a,Kappa) Fragment (26-10) Complex With Digoxin) peptide 4
FSGVPDRFSGSGSGTDFTLK

SEQ ID NO: 1090 - protein, 11 aa, Artificial Sequence
  Description of Artificial Sequence: Ig (C Chain C, Fab (Igg2a,Kappa) Fragment (26-10) Complex With Digoxin) peptide 5
  MOD_RES (11)..(11): Lys-carbamidomethyl oxidation
HNSYTCEATHK

SEQ ID NO: 1091 - protein, 19 aa, Artificial Sequence
  Description of Artificial Sequence: Ig (C Chain C, Fab (Igg2a,Kappa) Fragment (26-10) Complex With Digoxin) peptide 6
  MOD_RES (19)..(19): Lys-carbamidomethyl oxidation
HNSYTCEATHKTSTSPIVK

SEQ ID NO: 1092 - protein, 14 aa, Artificial Sequence
  Description of Artificial Sequence: Ig (C Chain C, Fab (Igg2a,Kappa) Fragment (26-10) Complex With Digoxin) peptide 7
QNGVLNSWTDQDSK

SEQ ID NO: 1093 - protein, 12 aa, Artificial Sequence
  Description of Artificial Sequence: Ig (C Chain C, Fab (Igg2a,Kappa) Fragment (26-10) Complex With Digoxin) peptide 8
TSTSPIVKSFNR

SEQ ID NO: 1094 - protein, 11 aa, Artificial Sequence
  Description of Artificial Sequence: Ig (C Chain C, Fab (Igg2a,Kappa) Fragment (26-10) Complex With Digoxin) peptide 9
VSNRFSGVPDR

SEQ ID NO: 1095 - protein, 16 aa, Artificial Sequence
  Description of Artificial Sequence: Ig (gamma-2b- immunoglobulin) peptide 1
APQVYILPPPAEQLSR

SEQ ID NO: 1096 - protein, 31 aa, Artificial Sequence
  Description of Artificial Sequence: Ig (gamma-2b- immunoglobulin) peptide 2
  MOD_RES (30)..(30): Lys-carbamidomethyl oxidation
  MOD_RES (31)..(31): Methionin oxidation
CPAPNLEGGPSVFIFPPNIKDVLMISLTPKM

SEQ ID NO: 1097 - protein, 21 aa, Artificial Sequence
  Description of Artificial Sequence: Ig (gamma-2b- immunoglobulin) peptide 3
  MOD_RES (21)..(21): Lys-carbamidomethyl oxidation-carbamidomethyl oxidation-carbamidomethyl oxidation
LEPSGPISTINPCPPCKECHK

SEQ ID NO: 1098 - protein, 11 aa, Artificial Sequence
  Description of Artificial Sequence: Ig (gamma-2b- immunoglobulin) peptide 4
  MOD_RES (11)..(11): Arg-carbamidomethyl oxidation
SEDTAMYYCAR

SEQ ID NO: 1099 - protein, 28 aa, Artificial Sequence
  Description of Artificial Sequence: Ig (gamma-2b- immunoglobulin) peptide 5
  MOD_RES (28)..(28): Lys-carbamidomethyl oxidation-carbamidomethyl oxidation
TTPPSVYPLAPGCGDTTGSSVTLGCLVK

SEQ ID NO: 1100 - protein, 12 aa, Artificial Sequence
  Description of Artificial Sequence: Ig (gamma-2b- immunoglobulin) peptide 6
VNNKDLPSPIER

SEQ ID NO: 1101 - protein, 20 aa, Artificial Sequence
  Description of Artificial Sequence: Ig (gamma-2b- immunoglobulin) peptide 7
  MOD_RES (20)..(20): Methionin oxidation
VVSALPIQHQDWMSGKEFKM

SEQ ID NO: 1102 - protein, 14 aa, Artificial Sequence
  Description of Artificial Sequence: Ig (immunoglobulin constant heavy chain) peptide 1
ALPSPIEKTISKPR

SEQ ID NO: 1103 - protein, 17 aa, Artificial Sequence
  Description of Artificial Sequence: Ig (immunoglobulin constant heavy chain) peptide 2
APQVYVLPPPAEEMTKK

SEQ ID NO: 1104 - protein, 22 aa, Artificial Sequence
  Description of Artificial Sequence: Ig (immunoglobulin constant heavy chain) peptide 3
  MOD_RES (22)..(22): Lys-carbamidomethyl oxidation-carbamidomethyl oxidation
ECPPCAAPDLLGGPSVFIFPPK

SEQ ID NO: 1105 - protein, 20 aa, Artificial Sequence
  Description of Artificial Sequence: Ig (immunoglobulin constant heavy chain) peptide 4
GPVRAPQVYVLPPPAEEMTK

SEQ ID NO: 1106 - protein, 20 aa, Artificial Sequence
  Description of Artificial Sequence: Ig (immunoglobulin constant heavy chain) peptide 5
  MOD_RES (20)..(20): Lys-carbamidomethyl oxidation
GSLFACSVVHEGLHNHLTTK

SEQ ID NO: 1107 - protein, 17 aa, Artificial Sequence
  Description of Artificial Sequence: Ig (immunoglobulin constant heavy chain) peptide 6
NTATVLDSDGSYFMYSK

SEQ ID NO: 1108 - protein, 24 aa, Artificial Sequence
  Description of Artificial Sequence: Ig (immunoglobulin constant heavy chain) peptide 7
  MOD_RES (24)..(24): Methionin oxidation
TEQNYKNTATVLDSDGSYFMYSKM

SEQ ID NO: 1109 - protein, 28 aa, Artificial Sequence
  Description of Artificial Sequence: Ig (immunoglobulin constant heavy chain) peptide 8
  MOD_RES (28)..(28): Lys-carbamidomethyl oxidation-carbamidomethyl oxidation
TTAPSVYPLAPVCGGTTGSSVTLGCLVK

SEQ ID NO: 1110 - protein, 12 aa, Artificial Sequence
  Description of Artificial Sequence: Ig (immunoglobulin constant heavy chain) peptide 9
  MOD_RES (12)..(12): Lys-carbamidomethyl oxidation
VPITQNPCPPLK

SEQ ID NO: 1111 - protein, 34 aa, Artificial Sequence
  Description of Artificial Sequence: Ig (immunoglobulin constant heavy chain) peptide 10
  MOD_RES (34)..(34): Lys-carbamidomethyl oxidation-carbamidomethyl oxidation-carbamidomethyl oxidation
VPITQNPCPPLKECPPCAAPDLLGGPSVFIFPPK

SEQ ID NO: 1112 - protein, 16 aa, Artificial Sequence
  Description of Artificial Sequence: Ig (immunoglobulin constant heavy chain) peptide 11
VVSALPIQHQDWMSGK

SEQ ID NO: 1113 - protein, 19 aa, Artificial Sequence
  Description of Artificial Sequence: Ig (immunoglobulin constant heavy chain) peptide 12
VVSALPIQHQDWMSGKEFK

SEQ ID NO: 1114 - protein, 9 aa, Artificial Sequence
  Description of Artificial Sequence: Ig (immunoglobulin IgM MP-18-3-117 kappa light chain) peptide 1
ALIYSASYR

SEQ ID NO: 1115 - protein, 21 aa, Artificial Sequence
  Description of Artificial Sequence: Ig (immunoglobulin IgM MP-18-3-117 kappa light chain) peptide 2
ASQNVGTNVAWYQQKPGQSPK

SEQ ID NO: 1116 - protein, 15 aa, Artificial Sequence
  Description of Artificial Sequence: Ig (immunoglobulin IgM MP-18-3-117 kappa light chain) peptide 3
  MOD_RES (15)..(15): Lys-carbamidomethyl oxidation
FMSTSVGDRVSVTCK

SEQ ID NO: 1117 - protein, 16 aa, Artificial Sequence
  Description of Artificial Sequence: Ig (immunoglobulin IgM MP-18-3-117 kappa light chain) peptide 4
  MOD_RES (16)..(16): Methionin oxidation-carbamidomethyl oxidation
FMSTSVGDRVSVTCKM

SEQ ID NO: 1118 - protein, 11 aa, Artificial Sequence
  Description of Artificial Sequence: Ig (immunoglobulin IgM MP-18-3-117 kappa light chain) peptide 5
  MOD_RES (11)..(11): Lys-carbamidomethyl oxidation
HNSYTCEATHK

SEQ ID NO: 1119 - protein, 19 aa, Artificial Sequence
  Description of Artificial Sequence: Ig (immunoglobulin IgM MP-18-3-117 kappa light chain) peptide 6
  MOD_RES (19)..(19): Lys-carbamidomethyl oxidation
HNSYTCEATHKTSTSPIVK

SEQ ID NO: 1120 - protein, 35 aa, Artificial Sequence; identical to SEQ ID NO: 260
  Description of Artificial Sequence: Ig (immunoglobulin IgM MP-18-3-117 kappa light chain) peptide 7
  MOD_RES (35)..(35): Lys-carbamidomethyl oxidation

SEQ ID NO: 1121 - protein, 24 aa, Artificial Sequence
  Description of Artificial Sequence: Ig (immunoglobulin kappa-chain VK-1) peptide 1
  MOD_RES (24)..(24): Arg-carbamidomethyl oxidation
DVQITQSPSYLAASPGETITINCR

SEQ ID NO: 1122 - protein, 27 aa, Artificial Sequence
  Description of Artificial Sequence: Ig (immunoglobulin kappa-chain VK-1) peptide 2
  MOD_RES (27)..(27): Lys-carbamidomethyl oxidation
DVQITQSPSYLAASPGETITINCRASK

SEQ ID NO: 1123 - protein, 16 aa, Artificial Sequence
  Description of Artificial Sequence: Ig (immunoglobulin kappa-chain VK-1) peptide 3
LLIYSGSTLQSGIPSR

SEQ ID NO: 1124 - protein, 15 aa, Artificial Sequence
  Description of Artificial Sequence: Ig (immunoglobulin kappa-chain VK-1) peptide 4
SISKYLAWYQEKPGK

SEQ ID NO: 1125 - protein, 19 aa, Artificial Sequence
  Description of Artificial Sequence: Ig (immunoglobulin kappa-chain VK-1) peptide 5
TNKLLIYSGSTLQSGIPSR

SEQ ID NO: 1126 - protein, 11 aa, Artificial Sequence
  Description of Artificial Sequence: Ig (immunoglobulin kappa-chain VK-1) peptide 6
YLAWYQEKPGK

SEQ ID NO: 1127 - protein, 14 aa, Artificial Sequence
  Description of Artificial Sequence: Ig (immunoglobulin kappa-chain VK-1) peptide 7
YLAWYQEKPGKTNK

SEQ ID NO: 1128 - protein, 17 aa, Artificial Sequence
  Description of Artificial Sequence: Ig (immunoglobulin light chain constant region) peptide 1
ANGTPITQGVDTSNPTK

SEQ ID NO: 1129 - protein, 19 aa, Artificial Sequence
  Description of Artificial Sequence: Ig (immunoglobulin light chain constant region) peptide 2
EGNKFMASSFLHLTSDQWR

SEQ ID NO: 1130 - protein, 15 aa, Artificial Sequence
  Description of Artificial Sequence: Ig (immunoglobulin light chain constant region) peptide 3
FMASSFLHLTSDQWR

SEQ ID NO: 1131 - protein, 18 aa, Artificial Sequence
  Description of Artificial Sequence: Ig (immunoglobulin light chain constant region) peptide 4
  MOD_RES (18)..(18): Lys-carbamidomethyl oxidation
SHNSFTCQVTHEGDTVEK

SEQ ID NO: 1132 - protein, 19 aa, Artificial Sequence
  Description of Artificial Sequence: Ig (immunoglobulin light chain constant region) peptide 5
STPTLTVFPPSSEELKENK

SEQ ID NO: 1133 - protein, 34 aa, Artificial Sequence; identical to SEQ ID NO: 256
  Description of Artificial Sequence: Ig (L Chain L, 64m-2 Antibody Fab Complexed With D(5ht)(6-4)t) peptide 1
  MOD_RES (34)..(34): Lys-carbamidomethyl oxidation

SEQ ID NO: 1134 - protein, 19 aa, Artificial Sequence
  Description of Artificial Sequence: Ig (L Chain L, 64m-2 Antibody Fab Complexed With D(5ht)(6-4)t) peptide 2
DSTYSMSSTLTLTKDEYER

SEQ ID NO: 1135 - protein, 24 aa, Artificial Sequence
  Description of Artificial Sequence: Ig (L Chain L, 64m-2 Antibody Fab Complexed With D(5ht)(6-4)t) peptide 3
  MOD_RES (24)..(24): Arg-carbamidomethyl oxidation
DVLMTQTPLSLPVSLGDQASISCR

SEQ ID NO: 1136 - protein, 13 aa, Artificial Sequence
  Description of Artificial Sequence: Ig (L Chain L, 64m-2 Antibody Fab Complexed With D(5ht)(6-4)t) peptide 4
FSGSGSGTDFTLK

SEQ ID NO: 1137 - protein, 20 aa, Artificial Sequence
  Description of Artificial Sequence: Ig (L Chain L, 64m-2 Antibody Fab Complexed With D(5ht)(6-4)t) peptide 5
FSGVPDRFSGSGSGTDFTLK

SEQ ID NO: 1138 - protein, 11 aa, Artificial Sequence
  Description of Artificial Sequence: Ig (L Chain L, 64m-2 Antibody Fab Complexed With D(5ht)(6-4)t) peptide 6
  MOD_RES (11)..(11): Lys-carbamidomethyl oxidation
HNSYTCEATHK

SEQ ID NO: 1139 - protein, 14 aa, Artificial Sequence
  Description of Artificial Sequence: Ig (L Chain L, 64m-2 Antibody Fab Complexed With D(5ht)(6-4)t) peptide 7
QNGVLNSWTDQDSK

SEQ ID NO: 1140 - protein, 35 aa, Artificial Sequence; identical to SEQ ID NO: 260
  Description of Artificial Sequence: Ig (L Chain L, 64m-2 Antibody Fab Complexed With D(5ht)(6-4)t) peptide 8
  MOD_RES (35)..(35): Lys-carbamidomethyl oxidation

SEQ ID NO: 1141 - protein, 26 aa, Artificial Sequence
  Description of Artificial Sequence: Ig (L Chain L, 64m-2 Antibody Fab Complexed With D(5ht)(6-4)t) peptide 9
SSQSIVHSNGNTYLEWYLQKPGQSPK

SEQ ID NO: 1142 - protein, 11 aa, Artificial Sequence
  Description of Artificial Sequence: Ig (L Chain L, 64m-2 Antibody Fab Complexed With D(5ht)(6-4)t) peptide 10
VSNRFSGVPDR

SEQ ID NO: 1143 - protein, 34 aa, Artificial Sequence; identical to SEQ ID NO: 256
  Description of Artificial Sequence: Ig (L Chain L, Anti Taq Fab Tp7) peptide 1
  MOD_RES (34)..(34): Lys-carbamidomethyl oxidation

SEQ ID NO: 1144 - protein, 16 aa, Artificial Sequence
  Description of Artificial Sequence: Ig (L Chain L, Anti Taq Fab Tp7) peptide 2
  MOD_RES (16)..(16): Lys-carbamidomethyl oxidation
DEYERHNSYTCEATHK

SEQ ID NO: 1145 - protein, 20 aa, Artificial Sequence
  Description of Artificial Sequence: Ig (L Chain L, Anti Taq Fab Tp7) peptide 3
  MOD_RES (19)..(20): Methionin oxidation
DIQMTQSPAIMSASPGEKMM

SEQ ID NO: 1146 - protein, 19 aa, Artificial Sequence
  Description of Artificial Sequence: Ig (L Chain L, Anti Taq Fab Tp7) peptide 4
DSTYSMSSTLTLTKDEYER

SEQ ID NO: 1147 - protein, 16 aa, Artificial Sequence
  Description of Artificial Sequence: Ig (L Chain L, Anti Taq Fab Tp7) peptide 5
FSGSGSGTSYSLTISR

SEQ ID NO: 1148 - protein, 11 aa, Artificial Sequence
  Description of Artificial Sequence: Ig (L Chain L, Anti Taq Fab Tp7) peptide 6
  MOD_RES (11)..(11): Lys-carbamidomethyl oxidation
HNSYTCEATHK

SEQ ID NO: 1149 - protein, 19 aa, Artificial Sequence
  Description of Artificial Sequence: Ig (L Chain L, Anti Taq Fab Tp7) peptide 7
  MOD_RES (19)..(19): Lys-carbamidomethyl oxidation
HNSYTCEATHKTSTSPIVK

SEQ ID NO: 1150 - protein, 16 aa, Artificial Sequence
  Description of Artificial Sequence: Ig (L Chain L, Anti Taq Fab Tp7) peptide 8
LLIYDSTNLASGVPVR

SEQ ID NO: 1151 - protein, 35 aa, Artificial Sequence; identical to SEQ ID NO: 260
  Description of Artificial Sequence: Ig (L Chain L, Anti Taq Fab Tp7) peptide 9
  MOD_RES (35)..(35): Lys-carbamidomethyl oxidation

SEQ ID NO: 1152 - protein, 34 aa, Artificial Sequence; identical to SEQ ID NO: 256
  Description of Artificial Sequence: Ig (L Chain L, Bactericidal Antibody Against Neisseria Meningitidis) peptide 1
  MOD_RES (34)..(34): Lys-carbamidomethyl oxidation

SEQ ID NO: 1153 - protein, 24 aa, Artificial Sequence
  Description of Artificial Sequence: Ig (L Chain L, Bactericidal Antibody Against Neisseria Meningitidis) peptide 2
  MOD_RES (24)..(24): Arg-carbamidomethyl oxidation
DIVMTQTPLSLPVSLGDKASISCR

SEQ ID NO: 1154 - protein, 25 aa, Artificial Sequence
  Description of Artificial Sequence: Ig (L Chain L, Bactericidal Antibody Against Neisseria Meningitidis) peptide 3
  MOD_RES (25)..(25): Methionin oxidation-carbamidomethyl oxidation
DIVMTQTPLSLPVSLGDKASISCRM

SEQ ID NO: 1155 - protein, 20 aa, Artificial Sequence
  Description of Artificial Sequence: Ig (L Chain L, Bactericidal Antibody Against Neisseria Meningitidis) peptide 4
  MOD_RES (20)..(20): Methionin oxidation
DSTYSMSSTLTLTKDEYERM

SEQ ID NO: 1156 - protein, 13 aa, Artificial Sequence
  Description of Artificial Sequence: Ig (L Chain L, Bactericidal Antibody Against Neisseria Meningitidis) peptide 5
FSGSGSGTDFTLK

SEQ ID NO: 1157 - protein, 20 aa, Artificial Sequence
  Description of Artificial Sequence: Ig (L Chain L, Bactericidal Antibody Against Neisseria Meningitidis) peptide 6
FSGVPDRFSGSGSGTDFTLK

SEQ ID NO: 1158 - protein, 11 aa, Artificial Sequence
  Description of Artificial Sequence: Ig (L Chain L, Bactericidal Antibody Against Neisseria Meningitidis) peptide 7
  MOD_RES (11)..(11): Lys-carbamidomethyl oxidation
HNSYTCEATHK

SEQ ID NO: 1159 - protein, 19 aa, Artificial Sequence
  Description of Artificial Sequence: Ig (L Chain L, Bactericidal Antibody Against Neisseria Meningitidis) peptide 8
  MOD_RES (19)..(19): Lys-carbamidomethyl oxidation
HNSYTCEATHKTSTSPIVK

SEQ ID NO: 1160 - protein, 14 aa, Artificial Sequence
  Description of Artificial Sequence: Ig (L Chain L, Bactericidal Antibody Against Neisseria Meningitidis) peptide 9
QNGVLNSWTDQDSK

SEQ ID NO: 1161 - protein, 11 aa, Artificial Sequence
  Description of Artificial Sequence: Ig (L Chain L, Bactericidal Antibody Against Neisseria Meningitidis) peptide 10
TFGGGTKLEIK

SEQ ID NO: 1162 - protein, 11 aa, Artificial Sequence
  Description of Artificial Sequence: Ig (L Chain L, Bactericidal Antibody Against Neisseria Meningitidis) peptide 11
VSNRFSGVPDR

SEQ ID NO: 1163 - protein, 34 aa, Artificial Sequence; identical to SEQ ID NO: 256
  Description of Artificial Sequence: Ig (L Chain L, Crystal Structure Of Immunoglobulin Fab Fragment Complexed With 17-Beta-Estradiol) peptide 1
  MOD_RES (34)..(34): Lys-carbamidomethyl oxidation

SEQ ID NO: 1164 - protein, 15 aa, Artificial Sequence
  Description of Artificial Sequence: Ig (L Chain L, Crystal Structure Of Immunoglobulin Fab Fragment Complexed With 17-Beta-Estradiol) peptide 2
ASGNIHNYLAWYQQK

SEQ ID NO: 1165 - protein, 16 aa, Artificial Sequence
  Description of Artificial Sequence: Ig (L Chain L, Crystal Structure Of Immunoglobulin Fab Fragment Complexed With 17-Beta-Estradiol) peptide 3
  MOD_RES (16)..(16): Lys-carbamidomethyl oxidation
DEYERHNSYTCEATHK

SEQ ID NO: 1166 - protein, 25 aa, Artificial Sequence
  Description of Artificial Sequence: Ig (L Chain L, Crystal Structure Of Immunoglobulin Fab Fragment Complexed With 17-Beta-Estradiol) peptide 4
  MOD_RES (25)..(25): Methionin oxidation-carbamidomethyl oxidation
DIQMTQSPASLSASVGETVTITCRM

SEQ ID NO: 1167 - protein, 19 aa, Artificial Sequence
  Description of Artificial Sequence: Ig (L Chain L, Crystal Structure Of Immunoglobulin Fab Fragment Complexed With 17-Beta-Estradiol) peptide 5
DSTYSMSSTLTLTKDEYER

SEQ ID NO: 1168 - protein, 20 aa, Artificial Sequence
  Description of Artificial Sequence: Ig (L Chain L, Crystal Structure Of Immunoglobulin Fab Fragment Complexed With 17-Beta-Estradiol) peptide 6
  MOD_RES (20)..(20): Methionin oxidation
DSTYSMSSTLTLTKDEYERM

SEQ ID NO: 1169 - protein, 13 aa, Artificial Sequence
  Description of Artificial Sequence: Ig (L Chain L, Crystal Structure Of Immunoglobulin Fab Fragment Complexed With 17-Beta-Estradiol) peptide 7
FSGSGSGTQYSLK

SEQ ID NO: 1170 - protein, 11 aa, Artificial Sequence
  Description of Artificial Sequence: Ig (L Chain L, Crystal Structure Of Immunoglobulin Fab Fragment Complexed With 17-Beta-Estradiol) peptide 8
  MOD_RES (11)..(11): Lys-carbamidomethyl oxidation
HNSYTCEATHK

SEQ ID NO: 1171 - protein, 19 aa, Artificial Sequence
  Description of Artificial Sequence: Ig (L Chain L, Crystal Structure Of Immunoglobulin Fab Fragment Complexed With 17-Beta-Estradiol) peptide 9
  MOD_RES (19)..(19): Lys-carbamidomethyl oxidation
HNSYTCEATHKTSTSPIVK

SEQ ID NO: 1172 - protein, 14 aa, Artificial Sequence
  Description of Artificial Sequence: Ig (L Chain L, Crystal Structure Of Immunoglobulin Fab Fragment Complexed With 17-Beta-Estradiol) peptide 10
QNGVLNSWTDQDSK

SEQ ID NO: 1173 - protein, 10 aa, Artificial Sequence
  Description of Artificial Sequence: Ig (L Chain L, Crystal Structure Of Immunoglobulin Fab Fragment Complexed With 17-Beta-Estradiol) peptide 11
SPQLLVYNAK

SEQ ID NO: 1174 - protein, 34 aa, Artificial Sequence; identical to SEQ ID NO: 256
  Description of Artificial Sequence: Ig (L Chain L, Crystal Structure Of The Fab Fragment Of The Mouse Anti- Human Fas Antibody Hfe7a) peptide 1
  MOD_RES (34)..(34): Lys-carbamidomethyl oxidation

SEQ ID NO: 1175 - protein, 25 aa, Artificial Sequence
  Description of Artificial Sequence: Ig (L Chain L, Crystal Structure Of The Fab Fragment Of The Mouse Anti- Human Fas Antibody Hfe7a) peptide 2
ASQSVDYDGDSYMNWYQQKPGQPPK

SEQ ID NO: 1176 - protein, 26 aa, Artificial Sequence
  Description of Artificial Sequence: Ig (L Chain L, Crystal Structure Of The Fab Fragment Of The Mouse Anti- Human Fas Antibody Hfe7a) peptide 3
  MOD_RES (26)..(26): Methionin oxidation
ASQSVDYDGDSYMNWYQQKPGQPPKM

SEQ ID NO: 1177 - protein, 18 aa, Artificial Sequence
  Description of Artificial Sequence: Ig (L Chain L, Crystal Structure Of The Fab Fragment Of The Mouse Anti- Human Fas Antibody Hfe7a) peptide 4
DIVLTQSPASLAVSLGQR

SEQ ID NO: 1178 - protein, 19 aa, Artificial Sequence
  Description of Artificial Sequence: Ig (L Chain L, Crystal Structure Of The Fab Fragment Of The Mouse Anti- Human Fas Antibody Hfe7a) peptide 5
DSTYSMSSTLTLTKDEYER

SEQ ID NO: 1179 - protein, 20 aa, Artificial Sequence
  Description of Artificial Sequence: Ig (L Chain L, Crystal Structure Of The Fab Fragment Of The Mouse Anti- Human Fas Antibody Hfe7a) peptide 6
  MOD_RES (20)..(20): Methionin oxidation
DSTYSMSSTLTLTKDEYERM

SEQ ID NO: 1180 - protein, 11 aa, Artificial Sequence
  Description of Artificial Sequence: Ig (L Chain L, Crystal Structure Of The Fab Fragment Of The Mouse Anti- Human Fas Antibody Hfe7a) peptide 7
  MOD_RES (11)..(11): Lys-carbamidomethyl oxidation
HNSYTCEATHK

SEQ ID NO: 1181 - protein, 16 aa, Artificial Sequence
  Description of Artificial Sequence: Ig (L Chain L, Crystal Structure Of The Fab Fragment Of The Mouse Anti- Human Fas Antibody Hfe7a) peptide 8
LLIYAASNLESGIPAR

SEQ ID NO: 1182 - protein, 34 aa, Artificial Sequence; identical to SEQ ID NO: 256
  Description of Artificial Sequence: Ig (L Chain L, Fab Fragment Of A Neutralizing Antibody Directed Against An Epitope Of Gp41 From Hiv-1) peptide 1
  MOD_RES (34)..(34): Lys-carbamidomethyl oxidation

SEQ ID NO: 1183 - protein, 24 aa, Artificial Sequence
  Description of Artificial Sequence: Ig (L Chain L, Fab Fragment Of A Neutralizing Antibody Directed Against An Epitope Of Gp41 From Hiv-1) peptide 2
  MOD_RES (24)..(24): Lys-carbamidomethyl oxidation
DVVMTQTPLTLSVTIGQPASISCK

SEQ ID NO: 1184 - protein, 25 aa, Artificial Sequence
  Description of Artificial Sequence: Ig (L Chain L, Fab Fragment Of A Neutralizing Antibody Directed Against An Epitope Of Gp41 From Hiv-1) peptide 3
  MOD_RES (25)..(25): Methionin oxidation-carbamidomethyl oxidation
DVVMTQTPLTLSVTIGQPASISCKM

SEQ ID NO: 1185 - protein, 13 aa, Artificial Sequence
  Description of Artificial Sequence: Ig (L Chain L, Fab Fragment Of A Neutralizing Antibody Directed Against An Epitope Of Gp41 From Hiv-1) peptide 4
FTGSGSGTDFTLK

SEQ ID NO: 1186 - protein, 11 aa, Artificial Sequence
  Description of Artificial Sequence: Ig (L Chain L, Fab Fragment Of A Neutralizing Antibody Directed Against An Epitope Of Gp41 From Hiv-1) peptide 5
  MOD_RES (11)..(11): Lys-carbamidomethyl oxidation
HNSYTCEATHK

SEQ ID NO: 1187 - protein, 19 aa, Artificial Sequence
  Description of Artificial Sequence: Ig (L Chain L, Fab Fragment Of A Neutralizing Antibody Directed Against An Epitope Of Gp41 From Hiv-1) peptide 6
  MOD_RES (19)..(19): Lys-carbamidomethyl oxidation
HNSYTCEATHKTSTSPIVK

SEQ ID NO: 1188 - protein, 21 aa, Artificial Sequence
  Description of Artificial Sequence: Ig (L Chain L, Fab Fragment Of A Neutralizing Antibody Directed Against An Epitope Of Gp41 From Hiv-1) peptide 7
LDSGVPDRFTGSGSGTDFTLK

SEQ ID NO: 1189 - protein, 15 aa, Artificial Sequence
  Description of Artificial Sequence: Ig (L Chain L, Fab Fragment Of A Neutralizing Antibody Directed Against An Epitope Of Gp41 From Hiv-1) peptide 8
LIYLVSKLDSGVPDR

SEQ ID NO: 1190 - protein, 14 aa, Artificial Sequence
  Description of Artificial Sequence: Ig (L Chain L, Fab Fragment Of A Neutralizing Antibody Directed Against An Epitope Of Gp41 From Hiv-1) peptide 9
QNGVLNSWTDQDSK

SEQ ID NO: 1191 - protein, 26 aa, Artificial Sequence
  Description of Artificial Sequence: Ig (L Chain L, Fab Fragment Of A Neutralizing Antibody Directed Against An Epitope Of Gp41 From Hiv-1) peptide 10
SSQSLLDSDGKTYLNWLLQRPGQSPK

SEQ ID NO: 1192 - protein, 11 aa, Artificial Sequence
  Description of Artificial Sequence: Ig (L Chain L, Fab Fragment Of A Neutralizing Antibody Directed Against An Epitope Of Gp41 From Hiv-1) peptide 11
TFGGGTKLEIK

SEQ ID NO: 1193 - protein, 19 aa, Artificial Sequence
  Description of Artificial Sequence: Ig (L Chain L, Fab Fragment Of A Neutralizing Antibody Directed Against An Epitope Of Gp41 From Hiv-1) peptide 12
  MOD_RES (19)..(19): Arg-carbamidomethyl oxidation
VEAEDLGVYYCWQGTHFPR

SEQ ID NO: 1194 - protein, 34 aa, Artificial Sequence; identical to SEQ ID NO: 256
  Description of Artificial Sequence: Ig (L Chain L, Fab Fragment Of Neutralising Monoclonal Antibody 4c4 Complexed With G-H Loop From Fmdv) peptide 1
  MOD_RES (34)..(34): Lys-carbamidomethyl oxidation

SEQ ID NO: 1195 - protein, 18 aa, Artificial Sequence
  Description of Artificial Sequence: Ig (L Chain L, Fab Fragment Of Neutralising Monoclonal Antibody 4c4 Complexed With G-H Loop From Fmdv) peptide 2
DIVLTQSPASLAVSLGQR

SEQ ID NO: 1196 - protein, 11 aa, Artificial Sequence
  Description of Artificial Sequence: Ig (L Chain L, Fab Fragment Of Neutralising Monoclonal Antibody 4c4 Complexed With G-H Loop From Fmdv) peptide 3
  MOD_RES (11)..(11): Lys-carbamidomethyl oxidation
HNSYTCEATHK

SEQ ID NO: 1197 - protein, 16 aa, Artificial Sequence
  Description of Artificial Sequence: Ig (L Chain L, Fab Fragment Of Neutralising Monoclonal Antibody 4c4 Complexed With G-H Loop From Fmdv) peptide 4
LLIYRASNLESGIPAR

SEQ ID NO: 1198 - protein, 35 aa, Artificial Sequence; identical to SEQ ID NO: 260
  Description of Artificial Sequence: Ig (L Chain L, Fab Fragment Of Neutralising Monoclonal Antibody 4c4 Complexed With G-H Loop From Fmdv) peptide 5
  MOD_RES (35)..(35): Lys-carbamidomethyl oxidation

SEQ ID NO: 1199 - protein, 19 aa, Artificial Sequence
  Description of Artificial Sequence: Ig (L Chain L, Structural Basis For Disfavored Elimination Reaction In Catalytic Antibody 1d4) peptide 1
DSTYSMSSTLTLTKDEYER

SEQ ID NO: 1200 - protein, 20 aa, Artificial Sequence
  Description of Artificial Sequence: Ig (L Chain L, Structural Basis For Disfavored Elimination Reaction In Catalytic Antibody 1d4) peptide 2
  MOD_RES (20)..(20): Methionin oxidation
DSTYSMSSTLTLTKDEYERM

SEQ ID NO: 1201 - protein, 24 aa, Artificial Sequence
  Description of Artificial Sequence: Ig (L Chain L, Structural Basis For Disfavored Elimination Reaction In Catalytic Antibody 1d4) peptide 3
  MOD_RES (24)..(24): Arg-carbamidomethyl oxidation
EVVMTQSPLSLPVSLGDQASISCR

SEQ ID NO: 1202 - protein, 25 aa, Artificial Sequence
  Description of Artificial Sequence: Ig (L Chain L, Structural Basis For Disfavored Elimination Reaction In Catalytic Antibody 1d4) peptide 4
  MOD_RES (25)..(25): Methionin oxidation-carbamidomethyl oxidation
EVVMTQSPLSLPVSLGDQASISCRM

SEQ ID NO: 1203 - protein, 13 aa, Artificial Sequence
  Description of Artificial Sequence: Ig (L Chain L, Structural Basis For Disfavored Elimination Reaction In Catalytic Antibody 1d4) peptide 5
FSGSGSGTDFTLK

SEQ ID NO: 1204 - protein, 20 aa, Artificial Sequence
  Description of Artificial Sequence: Ig (L Chain L, Structural Basis For Disfavored Elimination Reaction In Catalytic Antibody 1d4) peptide 6
FSGVPDRFSGSGSGTDFTLK

SEQ ID NO: 1205 - protein, 11 aa, Artificial Sequence
  Description of Artificial Sequence: Ig (L Chain L, Structural Basis For Disfavored Elimination Reaction In Catalytic Antibody 1d4) peptide 7
  MOD_RES (11)..(11): Lys-carbamidomethyl oxidation
HNSYTCEATHK

SEQ ID NO: 1206 - protein, 19 aa, Artificial Sequence
  Description of Artificial Sequence: Ig (L Chain L, Structural Basis For Disfavored Elimination Reaction In Catalytic Antibody 1d4) peptide 8
  MOD_RES (19)..(19): Lys-carbamidomethyl oxidation
HNSYTCEATHKTSTSPIVK

SEQ ID NO: 1207 - protein, 14 aa, Artificial Sequence
  Description of Artificial Sequence: Ig (L Chain L, Structural Basis For Disfavored Elimination Reaction In Catalytic Antibody 1d4) peptide 9
QNGVLNSWTDQDSK

SEQ ID NO: 1208 - protein, 26 aa, Artificial Sequence
  Description of Artificial Sequence: Ig (L Chain L, Structural Basis For Disfavored Elimination Reaction In Catalytic Antibody 1d4) peptide 10
SSQSLVHSNGNTYLHWYLQKPGQSPK

SEQ ID NO: 1209 - protein, 12 aa, Artificial Sequence
  Description of Artificial Sequence: Ig (L Chain L, Structural Basis For Disfavored Elimination Reaction In Catalytic Antibody 1d4) peptide 11
TSTSPIVKSFNR

SEQ ID NO: 1210 - protein, 11 aa, Artificial Sequence
  Description of Artificial Sequence: Ig (L Chain L, Structural Basis For Disfavored Elimination Reaction In Catalytic Antibody 1d4) peptide 12
VSNRFSGVPDR

SEQ ID NO: 1211 - protein, 16 aa, Artificial Sequence
  Description of Artificial Sequence: Ig (L Chain L, Structure Of A Catalytic Antibody, Igg2a Fab Fragment) peptide 1
  MOD_RES (16)..(16): Lys-carbamidomethyl oxidation
DEYERHNSYTCEATHK

SEQ ID NO: 1212 - protein, 36 aa, Artificial Sequence
  Description of Artificial Sequence: Ig (L Chain L, Structure Of A Catalytic Antibody, Igg2a Fab Fragment) peptide 2
  MOD_RES (36)..(36): Methionin oxidation-carbamidomethyl oxidation
DIVMTQSPLTLSVTIGQPASISCKSSQSLLYSNGKM

SEQ ID NO: 1213 - protein, 19 aa, Artificial Sequence
  Description of Artificial Sequence: Ig (L Chain L, Structure Of A Catalytic Antibody, Igg2a Fab Fragment) peptide 3
DSTYSMSSTLTLTKDEYER

SEQ ID NO: 1214 - protein, 20 aa, Artificial Sequence
  Description of Artificial Sequence: Ig (L Chain L, Structure Of A Catalytic Antibody, Igg2a Fab Fragment) peptide 4
  MOD_RES (20)..(20): Methionin oxidation
DSTYSMSSTLTLTKDEYERM

SEQ ID NO: 1215 - protein, 13 aa, Artificial Sequence
  Description of Artificial Sequence: Ig (L Chain L, Structure Of A Catalytic Antibody, Igg2a Fab Fragment) peptide 5
FTGSGSGTDFTLK

SEQ ID NO: 1216 - protein, 11 aa, Artificial Sequence
  Description of Artificial Sequence: Ig (L Chain L, Structure Of A Catalytic Antibody, Igg2a Fab Fragment) peptide 6
  MOD_RES (11)..(11): Lys-carbamidomethyl oxidation
HNSYTCEATHK

SEQ ID NO: 1217 - protein, 21 aa, Artificial Sequence
  Description of Artificial Sequence: Ig (L Chain L, Structure Of A Catalytic Antibody, Igg2a Fab Fragment) peptide 7
LDSGVPDRFTGSGSGTDFTLK

SEQ ID NO: 1218 - protein, 14 aa, Artificial Sequence
  Description of Artificial Sequence: Ig (L Chain L, Structure Of A Catalytic Antibody, Igg2a Fab Fragment) peptide 8
QNGVLNSWTDQDSK

SEQ ID NO: 1219 - protein, 16 aa, Artificial Sequence
  Description of Artificial Sequence: Ig (mAb immunoglobulin light chain variable region) peptide 1
FSGSGSGTSYSLTISR

SEQ ID NO: 1220 - protein, 31 aa, Artificial Sequence
  Description of Artificial Sequence: Ig (mAb immunoglobulin light chain variable region) peptide 2
  MOD_RES (31)..(31): Methionin oxidation-carbamidomethyl oxidation
FSGSGSGTSYSLTISRMEAEDAATYYCQQRM

SEQ ID NO: 1221 - protein, 14 aa, Artificial Sequence
  Description of Artificial Sequence: Ig (mAb immunoglobulin light chain variable region) peptide 3
  MOD_RES (14)..(14): Arg-carbamidomethyl oxidation
MEAEDAATYYCQQR

SEQ ID NO: 1222 - protein, 15 aa, Artificial Sequence
  Description of Artificial Sequence: Ig (mAb immunoglobulin light chain variable region) peptide 4
  MOD_RES (15)..(15): Methionin oxidation-carbamidomethyl oxidation
MEAEDAATYYCQQRM

SEQ ID NO: 1223 - protein, 19 aa, Artificial Sequence
  Description of Artificial Sequence: Ig (mAb immunoglobulin light chain variable region) peptide 5
  MOD_RES (19)..(19): Methionin oxidation
QIVLTQSPAIMSASPGEKM

SEQ ID NO: 1224 - protein, 12 aa, Artificial Sequence
  Description of Artificial Sequence: Ig (mAb immunoglobulin light chain variable region) peptide 6
SSYPFTFGSGTK

SEQ ID NO: 1225 - protein, 16 aa, Artificial Sequence
  Description of Artificial Sequence: Ig (mAb immunoglobulin light chain variable region) peptide 7
SSYPFTFGSGTKLEIK

SEQ ID NO: 1226 - protein, 19 aa, Artificial Sequence
  Description of Artificial Sequence: Ig (monoclonal antibody BBK-2 light chain) peptide 1
  MOD_RES (19)..(19): Arg-carbamidomethyl oxidation
CDIQMTQTTSALSASLGDR

SEQ ID NO: 1227 - protein, 20 aa, Artificial Sequence
  Description of Artificial Sequence: Ig (monoclonal antibody BBK-2 light chain) peptide 2
  MOD_RES (19)..(19): Arg-carbamidomethyl oxidation
  MOD_RES (20)..(20): Methionin oxidation
CDIQMTQTTSALSASLGDRM

SEQ ID NO: 1228 - protein, 20 aa, Artificial Sequence
  Description of Artificial Sequence: Ig (monoclonal antibody BBK-2 light chain) peptide 3
  MOD_RES (20)..(20): Methionin oxidation
DSTYSMSSTLTLTKDEYERM

SEQ ID NO: 1229 - protein, 11 aa, Artificial Sequence
  Description of Artificial Sequence: Ig (monoclonal antibody BBK-2 light chain) peptide 4
  MOD_RES (11)..(11): Lys-carbamidomethyl oxidation
HNSYTCEATHK

SEQ ID NO: 1230 - protein, 19 aa, Artificial Sequence
  Description of Artificial Sequence: Ig (monoclonal antibody BBK-2 light chain) peptide 5
  MOD_RES (19)..(19): Lys-carbamidomethyl oxidation
HNSYTCEATHKTSTSPIVK

SEQ ID NO: 1231 - protein, 20 aa, Artificial Sequence
  Description of Artificial Sequence: Ig (monoclonal antibody BBK-2 light chain) peptide 6
  MOD_RES (20)..(20): Methionin oxidation-carbamidomethyl oxidation
MRFSAQFLGLLLLCFQGTRM

SEQ ID NO: 1232 - protein, 31 aa, Artificial Sequence
  Description of Artificial Sequence: Ig (monoclonal antibody BBK-2 light chain) peptide 7
  MOD_RES (31)..(31): Lys-carbamidomethyl oxidation
NLEQEDVATYFCQQGYTLPYTFGGGTKLEIK

SEQ ID NO: 1233 - protein, 14 aa, Artificial Sequence
  Description of Artificial Sequence: Ig (monoclonal antibody BBK-2 light chain) peptide 8
QNGVLNSWTDQDSK

SEQ ID NO: 1234 - protein, 19 aa, Artificial Sequence
  Description of Artificial Sequence: Ig (mu(b) immunoglobulin heavy chain) peptide 1
DGKLVESGFTTDPVTIENK

SEQ ID NO: 1235 - protein, 24 aa, Artificial Sequence
  Description of Artificial Sequence: Ig (mu(b) immunoglobulin heavy chain) peptide 2
  MOD_RES (24)..(24): Methionin oxidation
DLHVPIPAVAEMNPNVNVFVPPRM

SEQ ID NO: 1236 - protein, 9 aa, Artificial Sequence
  Description of Artificial Sequence: Ig (mu(b) immunoglobulin heavy chain) peptide 3
  MOD_RES (9)..(9): Arg-carbamidomethyl oxidation
EFVCTVTHR

SEQ ID NO: 1237 - protein, 16 aa, Artificial Sequence
  Description of Artificial Sequence: Ig (mu(b) immunoglobulin heavy chain) peptide 4
  MOD_RES (16)..(16): Lys-carbamidomethyl oxidation
EQLNLRESATVTCLVK

SEQ ID NO: 1238 - protein, 10 aa, Artificial Sequence
  Description of Artificial Sequence: Ig (mu(b) immunoglobulin heavy chain) peptide 5
FISKPNEVHK

SEQ ID NO: 1239 - protein, 14 aa, Artificial Sequence
  Description of Artificial Sequence: Ig (mu(b) immunoglobulin heavy chain) peptide 6
GFSPADISVQWLQR

SEQ ID NO: 1240 - protein, 13 aa, Artificial Sequence
  Description of Artificial Sequence: Ig (mu(b) immunoglobulin heavy chain) peptide 7
  MOD_RES (13)..(13): Arg-carbamidomethyl oxidation
GVASVCVEDWNNR

SEQ ID NO: 1241 - protein, 14 aa, Artificial Sequence
  Description of Artificial Sequence: Ig (mu(b) immunoglobulin heavy chain) peptide 8
  MOD_RES (14)..(14): Lys-carbamidomethyl oxidation
GVASVCVEDWNNRK

SEQ ID NO: 1242 - protein, 12 aa, Artificial Sequence
  Description of Artificial Sequence: Ig (mu(b) immunoglobulin heavy chain) peptide 9
HPPAVYLLPPAR

SEQ ID NO: 1243 - protein, 10 aa, Artificial Sequence
  Description of Artificial Sequence: Ig (mu(b) immunoglobulin heavy chain) peptide 10
  MOD_RES (10)..(10): Arg-carbamidomethyl oxidation
KEFVCTVTHR

SEQ ID NO: 1244 - protein, 19 aa, Artificial Sequence
  Description of Artificial Sequence: Ig (mu(b) immunoglobulin heavy chain) peptide 11
  MOD_RES (19)..(19): Lys-carbamidomethyl oxidation
LICEATNFTPKPITVSWLK

SEQ ID NO: 1245 - protein, 16 aa, Artificial Sequence
  Description of Artificial Sequence: Ig (mu(b) immunoglobulin heavy chain) peptide 12
LVESGFTTDPVTIENK

SEQ ID NO: 1246 - protein, 24 aa, Artificial Sequence
  Description of Artificial Sequence: Ig (mu(b) immunoglobulin heavy chain) peptide 13
LVESGFTTDPVTIENKGSTPQTYK

SEQ ID NO: 1247 - protein, 25 aa, Artificial Sequence
  Description of Artificial Sequence: Ig (mu(b) immunoglobulin heavy chain) peptide 14
NKDLHVPIPAVAEMNPNVNVFVPPR

SEQ ID NO: 1248 - protein, 26 aa, Artificial Sequence
  Description of Artificial Sequence: Ig (mu(b) immunoglobulin heavy chain) peptide 15
  MOD_RES (26)..(26): Methionin oxidation
NKDLHVPIPAVAEMNPNVNVFVPPRM

SEQ ID NO: 1249 - protein, 10 aa, Artificial Sequence
  Description of Artificial Sequence: Ig (mu(b) immunoglobulin heavy chain) peptide 16
  MOD_RES (10)..(10): Arg-carbamidomethyl oxidation
NLVAMGCLAR

SEQ ID NO: 1250 - protein, 11 aa, Artificial Sequence
  Description of Artificial Sequence: Ig (mu(b) immunoglobulin heavy chain) peptide 17
  MOD_RES (11)..(11): Methionin oxidation-carbamidomethyl oxidation
NLVAMGCLARM

SEQ ID NO: 1251 - protein, 13 aa, Artificial Sequence
  Description of Artificial Sequence: Ig (mu(b) immunoglobulin heavy chain) peptide 18
  MOD_RES (13)..(13): Lys-carbamidomethyl oxidation
SILEGSDEYLVCK

SEQ ID NO: 1252 - protein, 16 aa, Artificial Sequence
  Description of Artificial Sequence: Ig (mu(b) immunoglobulin heavy chain) peptide 19
TGGKYLATSQVLLSPK

SEQ ID NO: 1253 - protein, 12 aa, Artificial Sequence
  Description of Artificial Sequence: Ig (mu(b) immunoglobulin heavy chain) peptide 20
YLATSQVLLSPK

SEQ ID NO: 1254 - protein, 16 aa, Artificial Sequence
  Description of Artificial Sequence: Ig (PC4436 monoclonal antibody 13-1 heavy chain) peptide 1
APQVYTIPPPKEQMAK

SEQ ID NO: 1255 - protein, 17 aa, Artificial Sequence
  Description of Artificial Sequence: Ig (PC4436 monoclonal antibody 13-1 heavy chain) peptide 2
  MOD_RES (17)..(17): Methionin oxidation
APQVYTIPPPKEQMAKM

SEQ ID NO: 1256 - protein, 14 aa, Artificial Sequence
  Description of Artificial Sequence: Ig (PC4436 monoclonal antibody 13-1 heavy chain) peptide 3
  MOD_RES (14)..(14): Lys-carbamidomethyl oxidation
CRVNSAAFPAPIEK

SEQ ID NO: 1257 - protein, 25 aa, Artificial Sequence
  Description of Artificial Sequence: Ig (PC4436 monoclonal antibody 13-1 heavy chain) peptide 4
  MOD_RES (25)..(25): Lys-carbamidomethyl oxidation-carbamidomethyl oxidation-carbamidomethyl oxidation-carbamidomethyl oxidation
DCGCKPCICTVPEVSSVFIFPPKPK

SEQ ID NO: 1258 - protein, 13 aa, Artificial Sequence
  Description of Artificial Sequence: Ig (PC4436 monoclonal antibody 13-1 heavy chain) peptide 5
DDSKSSVYLQMNR

SEQ ID NO: 1259 - protein, 15 aa, Artificial Sequence
  Description of Artificial Sequence: Ig (PC4436 monoclonal antibody 13-1 heavy chain) peptide 6
GRPKAPQVYTIPPPK

SEQ ID NO: 1260 - protein, 25 aa, Artificial Sequence
  Description of Artificial Sequence: Ig (PC4436 monoclonal antibody 13-1 heavy chain) peptide 7
  MOD_RES (25)..(25): Lys-carbamidomethyl oxidation
SNWEAGNTFTCSVLHEGLHNHHTEK

SEQ ID NO: 1261 - protein, 29 aa, Artificial Sequence
  Description of Artificial Sequence: Ig (PC4436 monoclonal antibody 13-1 heavy chain) peptide 8
  MOD_RES (29)..(29): Methionin oxidation-carbamidomethyl oxidation
TTPPSVYPLAPGSAAQTNSMVTLGCLVKM

SEQ ID NO: 1262 - protein, 12 aa, Artificial Sequence
  Description of Artificial Sequence: Ig (PC4436 monoclonal antibody 13-1 heavy chain) peptide 9
VNSAAFPAPIEK

SEQ ID NO: 1263 - protein, 16 aa, Artificial Sequence
  Description of Artificial Sequence: Ig (PC4436 monoclonal antibody 13-1 heavy chain) peptide 10
VNSAAFPAPIEKTISK

SEQ ID NO: 1264 - protein, 18 aa, Artificial Sequence
  Description of Artificial Sequence: Ig (Pterin-mimicking anti-idiotope kappa chain variable region) peptide 1
DIVLTQSPASLAVSLGQR

SEQ ID NO: 1265 - protein, 31 aa, Artificial Sequence
  Description of Artificial Sequence: Ig (Pterin-mimicking anti-idiotope kappa chain variable region) peptide 2
  MOD_RES (31)..(31): Arg-carbamidomethyl oxidation
FSGSGSGTDFTLNIHPVEEEDAATYYCQHSR

SEQ ID NO: 1266 - protein, 16 aa, Artificial Sequence
  Description of Artificial Sequence: Ig (Pterin-mimicking anti-idiotope kappa chain variable region) peptide 3
LLIYLASNLESGVPAR

SEQ ID NO: 1267 - protein, 15 aa, Artificial Sequence
  Description of Artificial Sequence: Ig (Pterin-mimicking anti-idiotope kappa chain variable region) peptide 4
ELPYTFGGGTKLEIK

SEQ ID NO: 1268 - protein, 24 aa, Artificial Sequence
  Description of Artificial Sequence: Ig (Pterin-mimicking anti-idiotope kappa chain variable region) peptide 5
  MOD_RES (24)..(24): Arg-carbamidomethyl oxidation
DIVLTQSPASLAVSLGQRATISCR

SEQ ID NO: 1269 - protein, 17 aa, Artificial Sequence
  Description of Artificial Sequence: Ig gamma-1 chain C region (15C5) (fragment) peptide 1
  MOD_RES (17)..(17): Methionin oxidation
APQVYTIPPPKEQMAKM

SEQ ID NO: 1270 - protein, 14 aa, Artificial Sequence
  Description of Artificial Sequence: Ig gamma-1 chain C region (15C5) (fragment) peptide 2
  MOD_RES (14)..(14): Lys-carbamidomethyl oxidation
CRVNSAAFPAPIEK

SEQ ID NO: 1271 - protein, 23 aa, Artificial Sequence
  Description of Artificial Sequence: Ig gamma-1 chain C region (15C5) (fragment) peptide 3
  MOD_RES (23)..(23): Methionin oxidation
NTQPIMDTDGSYFVYSKLNVQKM

SEQ ID NO: 1272 - protein, 25 aa, Artificial Sequence
  Description of Artificial Sequence: Ig gamma-1 chain C region (15C5) (fragment) peptide 4
  MOD_RES (25)..(25): Lys-carbamidomethyl oxidation
SNWEAGNTFTCSVLHEGLHNHHTEK

SEQ ID NO: 1273 - protein, 16 aa, Artificial Sequence
  Description of Artificial Sequence: Ig gamma-1 chain C region (15C5) (fragment) peptide 5
SVSELPIMHQDWLNGK

SEQ ID NO: 1274 - protein, 17 aa, Artificial Sequence
  Description of Artificial Sequence: Ig gamma-1 chain C region (15C5) (fragment) peptide 6
  MOD_RES (17)..(17): Methionin oxidation
SVSELPIMHQDWLNGKM

SEQ ID NO: 1275 - protein, 12 aa, Artificial Sequence
  Description of Artificial Sequence: Ig gamma-1 chain C region (15C5) (fragment) peptide 7
VNSAAFPAPIEK

SEQ ID NO: 1276 - protein, 16 aa, Artificial Sequence
  Description of Artificial Sequence: Ig gamma-1 chain C region (15C5) (fragment) peptide 8
VNSAAFPAPIEKTISK

SEQ ID NO: 1277 - protein, 13 aa, Artificial Sequence
  Description of Artificial Sequence: Ig gamma-chain, secrete-type peptide 1
AQTPQVYTIPPPR

SEQ ID NO: 1278 - protein, 18 aa, Artificial Sequence
  Description of Artificial Sequence: Ig gamma-chain, secrete-type peptide 2
AQTPQVYTIPPPREQMSK

SEQ ID NO: 1279 - protein, 19 aa, Artificial Sequence
  Description of Artificial Sequence: Ig gamma-chain, secrete-type peptide 3
  MOD_RES (19)..(19): Methionin oxidation
AQTPQVYTIPPPREQMSKM

SEQ ID NO: 1280 - protein, 11 aa, Artificial Sequence
  Description of Artificial Sequence: Ig gamma-chain, secrete-type peptide 4
  MOD_RES (11)..(11): Methionin oxidation
DALMISLTPKM

SEQ ID NO: 1281 - protein, 10 aa, Artificial Sequence
  Description of Artificial Sequence: Ig gamma-chain, secrete-type peptide 5
EVHTAWTQPR

SEQ ID NO: 1282 - protein, 10 aa, Artificial Sequence
  Description of Artificial Sequence: Ig gamma-chain, secrete-type peptide 6
GYFPEPVTVK

SEQ ID NO: 1283 - protein, 21 aa, Artificial Sequence
  Description of Artificial Sequence: Ig gamma-chain, secrete-type peptide 7
GYFPEPVTVKWNYGALSSGVR

SEQ ID NO: 1284 - protein, 17 aa, Artificial Sequence
  Description of Artificial Sequence: Ig gamma-chain, secrete-type peptide 8
NTPPILDSDGTYFLYSK

SEQ ID NO: 1285 - protein, 12 aa, Artificial Sequence
  Description of Artificial Sequence: Ig gamma-chain, secrete-type peptide 9
VNNKALPAPIER

SEQ ID NO: 1286 - protein, 14 aa, Artificial Sequence
  Description of Artificial Sequence: Ig gamma-chain, secrete-type peptide 10
VVSALPIQHQDWMR

SEQ ID NO: 1287 - protein, 15 aa, Artificial Sequence
  Description of Artificial Sequence: Ig gamma-chain, secrete-type peptide 11
  MOD_RES (15)..(15): Methionin oxidation
VVSALPIQHQDWMRM

SEQ ID NO: 1288 - protein, 11 aa, Artificial Sequence
  Description of Artificial Sequence: Ig gamma-chain, secrete-type peptide 12
WNYGALSSGVR

SEQ ID NO: 1289 - protein, 16 aa, Artificial Sequence
  Description of Artificial Sequence: Ig H-C allotype gamma2b peptide 1
APQVYILPPPAEQLSR

SEQ ID NO: 1290 - protein, 17 aa, Artificial Sequence
  Description of Artificial Sequence: Ig H-C allotype gamma2b peptide 2
APQVYILPPPAEQLSRK

SEQ ID NO: 1291 - protein, 20 aa, Artificial Sequence
  Description of Artificial Sequence: Ig H-C allotype gamma2b peptide 3
  MOD_RES (20)..(20): Lys-carbamidomethyl oxidation
CPAPNLEGGPSVFIFPPNIK

SEQ ID NO: 1292 - protein, 30 aa, Artificial Sequence
  Description of Artificial Sequence: Ig H-C allotype gamma2b peptide 4
  MOD_RES (30)..(30): Lys-carbamidomethyl oxidation
CPAPNLEGGPSVFIFPPNIKDVLMISLTPK

SEQ ID NO: 1293 - protein, 31 aa, Artificial Sequence; identical to SEQ ID NO: 1096
  Description of Artificial Sequence: Ig H-C allotype gamma2b peptide 5
  MOD_RES (30)..(30): Lys-carbamidomethyl oxidation
  MOD_RES (31)..(31): Methionin oxidation

SEQ ID NO: 1294 - protein, 20 aa, Artificial Sequence
  Description of Artificial Sequence: Ig H-C allotype gamma2b peptide 6
GLVRAPQVYILPPPAEQLSR

SEQ ID NO: 1295 - protein, 10 aa, Artificial Sequence
  Description of Artificial Sequence: Ig H-C allotype gamma2b peptide 7
HEGLKNYYLK

SEQ ID NO: 1296 - protein, 19 aa, Artificial Sequence
  Description of Artificial Sequence: Ig H-C allotype gamma2b peptide 8
ISWFVNNVEVHTAQTQTHR

SEQ ID NO: 1297 - protein, 21 aa, Artificial Sequence
  Description of Artificial Sequence: Ig H-C allotype gamma2b peptide 9
  MOD_RES (21)..(21): Lys-carbamidomethyl oxidation-carbamidomethyl oxidation-carbamidomethyl oxidation
LEPSGPISTINPCPPCKECHK

SEQ ID NO: 1298 - protein, 9 aa, Artificial Sequence
  Description of Artificial Sequence: Ig H-C allotype gamma2b peptide 10
  MOD_RES (9)..(9): Arg-carbamidomethyl oxidation
TDSFSCNVR

SEQ ID NO: 1299 - protein, 14 aa, Artificial Sequence
  Description of Artificial Sequence: Ig H-C allotype gamma2b peptide 11
  MOD_RES (14)..(14): Lys-carbamidomethyl oxidation
TDSFSCNVRHEGLK

SEQ ID NO: 1300 - protein, 28 aa, Artificial Sequence
  Description of Artificial Sequence: Ig H-C allotype gamma2b peptide 12
  MOD_RES (28)..(28): Lys-carbamidomethyl oxidation-carbamidomethyl oxidation
TTPPSVYPLAPGCGDTTGSSVTLGCLVK

SEQ ID NO: 1301 - protein, 12 aa, Artificial Sequence
  Description of Artificial Sequence: Ig H-C allotype gamma2b peptide 13
VNNKDLPSPIER

SEQ ID NO: 1302 - protein, 16 aa, Artificial Sequence
  Description of Artificial Sequence: Ig H-C allotype gamma2b peptide 14
  MOD_RES (16)..(16): Arg-carbamidomethyl oxidation
VTCVVVDVSEDDPDVR

SEQ ID NO: 1303 - protein, 16 aa, Artificial Sequence
  Description of Artificial Sequence: Ig H-C allotype gamma2b peptide 15
VVSALPIQHQDWMSGK

SEQ ID NO: 1304 - protein, 17 aa, Artificial Sequence
  Description of Artificial Sequence: Ig H-C allotype gamma2b peptide 16
  MOD_RES (17)..(17): Methionin oxidation
VVSALPIQHQDWMSGKM

SEQ ID NO: 1305 - protein, 19 aa, Artificial Sequence
  Description of Artificial Sequence: Ig H-C allotype gamma2b peptide 17
VVSALPIQHQDWMSGKEFK

SEQ ID NO: 1306 - protein, 20 aa, Artificial Sequence
  Description of Artificial Sequence: Ig H-C allotype gamma2b peptide 18
  MOD_RES (20)..(20): Methionin oxidation
VVSALPIQHQDWMSGKEFKM

SEQ ID NO: 1307 - protein, 12 aa, Artificial Sequence
  Description of Artificial Sequence: Ig H-C allotype gamma2b peptide 19
  MOD_RES (12)..(12): Arg-carbamidomethyl oxidation
WEKTDSFSCNVR

SEQ ID NO: 1308 - protein, 9 aa, Artificial Sequence
  Description of Artificial Sequence: Ig J chain peptide 1
  MOD_RES (9)..(9): Arg-carbamidomethyl oxidation
CYTTMVPLR

SEQ ID NO: 1309 - protein, 10 aa, Artificial Sequence
  Description of Artificial Sequence: Ig J chain peptide 2
  MOD_RES (9)..(9): Arg-carbamidomethyl oxidation
  MOD_RES (10)..(10): Methionin oxidation
CYTTMVPLRM

SEQ ID NO: 1310 - protein, 15 aa, Artificial Sequence
  Description of Artificial Sequence: Ig J chain peptide 3
  MOD_RES (15)..(15): Lys-carbamidomethyl oxidation
CYTTMVPLRYHGETK

SEQ ID NO: 1311 - protein, 16 aa, Artificial Sequence
  Description of Artificial Sequence: Ig J chain peptide 4
  MOD_RES (15)..(15): Lys-carbamidomethyl oxidation
  MOD_RES (16)..(16): Methionin oxidation
CYTTMVPLRYHGETKM

SEQ ID NO: 1312 - protein, 15 aa, Artificial Sequence
  Description of Artificial Sequence: Ig J chain peptide 5
IIPSTEDPNEDIVER

SEQ ID NO: 1313 - protein, 18 aa, Artificial Sequence
  Description of Artificial Sequence: Ig J chain peptide 6
IIPSTEDPNEDIVERNIR

SEQ ID NO: 1314 - protein, 15 aa, Artificial Sequence
  Description of Artificial Sequence: Ig J chain peptide 7
  MOD_RES (15)..(15): Methionin oxidation-carbamidomethyl oxidation
MVQAALTPDSCYPDM

SEQ ID NO: 1315 - protein, 11 aa, Artificial Sequence
  Description of Artificial Sequence: Ig J chain peptide 8
  MOD_RES (11)..(11): Lys-carbamidomethyl oxidation
NFVYHLSDVCK

SEQ ID NO: 1316 - protein, 12 aa, Artificial Sequence
  Description of Artificial Sequence: Ig J chain peptide 9
  MOD_RES (12)..(12): Lys-carbamidomethyl oxidation
NFVYHLSDVCKK

SEQ ID NO: 1317 - protein, 34 aa, Artificial Sequence; identical to SEQ ID NO: 256
  Description of Artificial Sequence: Ig K (unnamed protein product) peptide 1
  MOD_RES (34)..(34): Lys-carbamidomethyl oxidation

SEQ ID NO: 1318 - protein, 15 aa, Artificial Sequence
  Description of Artificial Sequence: Ig K (unnamed protein product) peptide 2
ASENIYSNLAWYQQK

SEQ ID NO: 1319 - protein, 18 aa, Artificial Sequence
  Description of Artificial Sequence: Ig K (unnamed protein product) peptide 3
ASENIYSNLAWYQQKQGK

SEQ ID NO: 1320 - protein, 11 aa, Artificial Sequence
  Description of Artificial Sequence: Ig K (unnamed protein product) peptide 4
  MOD_RES (11)..(11): Lys-carbamidomethyl oxidation
HNSYTCEATHK

SEQ ID NO: 1321 - protein, 19 aa, Artificial Sequence
  Description of Artificial Sequence: Ig K (unnamed protein product) peptide 5
  MOD_RES (19)..(19): Lys-carbamidomethyl oxidation
HNSYTCEATHKTSTSPIVK

SEQ ID NO: 1322 - protein, 22 aa, Artificial Sequence
  Description of Artificial Sequence: Ig K (unnamed protein product) peptide 6
QGKSPQLLVYAATNLADGVPSR

SEQ ID NO: 1323 - protein, 35 aa, Artificial Sequence; identical to SEQ ID NO: 260
  Description of Artificial Sequence: Ig K (unnamed protein product) peptide 7
  MOD_RES (35)..(35): Lys-carbamidomethyl oxidation

SEQ ID NO: 1324 - protein, 19 aa, Artificial Sequence
  Description of Artificial Sequence: Ig K (unnamed protein product) peptide 8
SPQLLVYAATNLADGVPSR

SEQ ID NO: 1325 - protein, 16 aa, Artificial Sequence
  Description of Artificial Sequence: Ig kappa chain peptide 1
ASSSVSSSYLHWYQQK

SEQ ID NO: 1326 - protein, 19 aa, Artificial Sequence
  Description of Artificial Sequence: Ig kappa chain peptide 2
  MOD_RES (19)..(19): Methionin oxidation
ENVLTQSPAIMSASPGEKM

SEQ ID NO: 1327 - protein, 25 aa, Artificial Sequence
  Description of Artificial Sequence: Ig kappa chain peptide 3
  MOD_RES (25)..(25): Methionin oxidation-carbamidomethyl oxidation
ENVLTQSPAIMSASPGEKVTMTCRM

SEQ ID NO: 1328 - protein, 26 aa, Artificial Sequence
  Description of Artificial Sequence: Ig kappa chain peptide 4
  MOD_RES (25)..(25): Methionin oxidation
  MOD_RES (26)..(26): Methionin oxidation-carbamidomethyl oxidation
ENVLTQSPAIMSASPGEKVTMTCRMM

SEQ ID NO: 1329 - protein, 16 aa, Artificial Sequence
  Description of Artificial Sequence: Ig kappa chain peptide 5
LWIYSTSNLASGVPAR

SEQ ID NO: 1330 - protein, 22 aa, Artificial Sequence
  Description of Artificial Sequence: Ig kappa chain peptide 6
SGASPKLWIYSTSNLASGVPAR

SEQ ID NO: 1331 - protein, 19 aa, Artificial Sequence
  Description of Artificial Sequence: Ig kappa chain peptide 1
  MOD_RES (19)..(19): Methionin oxidation
DIVMSQSPSSLAVSVGEKM

SEQ ID NO: 1332 - protein, 25 aa, Artificial Sequence
  Description of Artificial Sequence: Ig kappa chain peptide 2
ESGVPDRFTGSGSGTDFTLTISSVK

SEQ ID NO: 1333 - protein, 18 aa, Artificial Sequence
  Description of Artificial Sequence: Ig kappa chain peptide 3
FTGSGSGTDFTLTISSVK

SEQ ID NO: 1334 - protein, 9 aa, Artificial Sequence
  Description of Artificial Sequence: Ig kappa chain peptide 4
LLIYWASTR

SEQ ID NO: 1335 - protein, 15 aa, Artificial Sequence
  Description of Artificial Sequence: Ig kappa chain peptide 5
NYLAWYQQKPGQSPK

SEQ ID NO: 1336 - protein, 12 aa, Artificial Sequence
  Description of Artificial Sequence: Ig kappa chain peptide 6
SSQSLLYSSNQK

SEQ ID NO: 1337 - protein, 22 aa, Artificial Sequence
  Description of Artificial Sequence: Ig kappa chain peptide 1
ASQDIGSSLNWLQQEPDGTIKR

SEQ ID NO: 1338 - protein, 18 aa, Artificial Sequence
  Description of Artificial Sequence: Ig kappa chain peptide 2
DIQMTQSPSSLSASLGER

SEQ ID NO: 1339 - protein, 19 aa, Artificial Sequence
  Description of Artificial Sequence: Ig kappa chain peptide 3
  MOD_RES (19)..(19): Methionin oxidation
DIQMTQSPSSLSASLGERM

SEQ ID NO: 1340 - protein, 14 aa, Artificial Sequence
  Description of Artificial Sequence: Ig kappa chain peptide 4
LIYATSSLDSGVPK

SEQ ID NO: 1341 - protein, 15 aa, Artificial Sequence
  Description of Artificial Sequence: Ig kappa chain peptide 5
LIYATSSLDSGVPKR

SEQ ID NO: 1342 - protein, 34 aa, Artificial Sequence; identical to SEQ ID NO: 256
  Description of Artificial Sequence: Ig kappa chain peptide 1
  MOD_RES (34)..(34): Lys-carbamidomethyl oxidation

SEQ ID NO: 1343 - protein, 15 aa, Artificial Sequence
  Description of Artificial Sequence: Ig kappa chain peptide 2
ASENIYSNLAWYQQK

SEQ ID NO: 1344 - protein, 18 aa, Artificial Sequence
  Description of Artificial Sequence: Ig kappa chain peptide 3
ASENIYSNLAWYQQKQGK

SEQ ID NO: 1345 - protein, 11 aa, Artificial Sequence
  Description of Artificial Sequence: Ig kappa chain peptide 4
  MOD_RES (11)..(11): Lys-carbamidomethyl oxidation
HNSYTCEATHK

SEQ ID NO: 1346 - protein, 19 aa, Artificial Sequence
  Description of Artificial Sequence: Ig kappa chain peptide 5
  MOD_RES (19)..(19): Lys-carbamidomethyl oxidation
HNSYTCEATHKTSTSPIVK

SEQ ID NO: 1347 - protein, 22 aa, Artificial Sequence
  Description of Artificial Sequence: Ig kappa chain peptide 6
QGKSPQLLVYAATNLADGVPSR

SEQ ID NO: 1348 - protein, 35 aa, Artificial Sequence; identical to SEQ ID NO: 260
  Description of Artificial Sequence: Ig kappa chain peptide 7
  MOD_RES (35)..(35): Lys-carbamidomethyl oxidation

SEQ ID NO: 1349 - protein, 19 aa, Artificial Sequence
  Description of Artificial Sequence: Ig kappa chain peptide 8
SPQLLVYAATNLADGVPSR

SEQ ID NO: 1350 - protein, 34 aa, Artificial Sequence; identical to SEQ ID NO: 256
  Description of Artificial Sequence: Ig kappa chain (Mab03-1) peptide 1
  MOD_RES (34)..(34): Lys-carbamidomethyl oxidation

SEQ ID NO: 1351 - protein, 16 aa, Artificial Sequence
  Description of Artificial Sequence: Ig kappa chain (Mab03-1) peptide 2
  MOD_RES (16)..(16): Lys-carbamidomethyl oxidation
DEYERHNSYTCEATHK

SEQ ID NO: 1352 - protein, 18 aa, Artificial Sequence
  Description of Artificial Sequence: Ig kappa chain (Mab03-1) peptide 3
DIVMTQSPSSLAMSVGQK

SEQ ID NO: 1353 - protein, 19 aa, Artificial Sequence
  Description of Artificial Sequence: Ig kappa chain (Mab03-1) peptide 4
  MOD_RES (19)..(19): Methionin oxidation
DIVMTQSPSSLAMSVGQKM

SEQ ID NO: 1354 - protein, 20 aa, Artificial Sequence
  Description of Artificial Sequence: Ig kappa chain (Mab03-1) peptide 5
  MOD_RES (19)..(20): Methionin oxidation
DIVMTQSPSSLAMSVGQKMM

SEQ ID NO: 1355 - protein, 20 aa, Artificial Sequence
  Description of Artificial Sequence: Ig kappa chain (Mab03-1) peptide 6
  MOD_RES (20)..(20): Methionin oxidation
DSTYSMSSTLTLTKDEYERM

SEQ ID NO: 1356 - protein, 11 aa, Artificial Sequence
  Description of Artificial Sequence: Ig kappa chain (Mab03-1) peptide 7
  MOD_RES (11)..(11): Lys-carbamidomethyl oxidation
HNSYTCEATHK

SEQ ID NO: 1357 - protein, 19 aa, Artificial Sequence
  Description of Artificial Sequence: Ig kappa chain (Mab03-1) peptide 8
  MOD_RES (19)..(19): Lys-carbamidomethyl oxidation
HNSYTCEATHKTSTSPIVK

SEQ ID NO: 1358 - protein, 9 aa, Artificial Sequence
  Description of Artificial Sequence: Ig kappa chain (Mab03-1) peptide 9
LLVYFASTR

SEQ ID NO: 1359 - protein, 15 aa, Artificial Sequence
  Description of Artificial Sequence: Ig kappa chain (Mab03-1) peptide 10
NYLAWYQQKPGQSPK

SEQ ID NO: 1360 - protein, 12 aa, Artificial Sequence
  Description of Artificial Sequence: Ig kappa chain (Mab03-1) peptide 11
SSQSLLNSRNQK

SEQ ID NO: 1361 - protein, 18 aa, Artificial Sequence
  Description of Artificial Sequence: Ig kappa chain V region (9.42) peptide 1
ASQDINKYIAWYQHKPGK

SEQ ID NO: 1362 - protein, 18 aa, Artificial Sequence
  Description of Artificial Sequence: Ig kappa chain V region (9.42) peptide 2
DIQMTQSPSSLSASLGGK

SEQ ID NO: 1363 - protein, 19 aa, Artificial Sequence
  Description of Artificial Sequence: Ig kappa chain V region (9.42) peptide 3
  MOD_RES (19)..(19): Methionin oxidation
DIQMTQSPSSLSASLGGKM

SEQ ID NO: 1364 - protein, 16 aa, Artificial Sequence
  Description of Artificial Sequence: Ig kappa chain V region (9.42) peptide 4
LLIHYTSTLQPGIPSR

SEQ ID NO: 1365 - protein, 11 aa, Artificial Sequence
  Description of Artificial Sequence: Ig kappa chain V region (9.42) peptide 5
YIAWYQHKPGK

SEQ ID NO: 1366 - protein, 14 aa, Artificial Sequence
  Description of Artificial Sequence: Ig kappa chain V region (9.42) peptide 6
YIAWYQHKPGKGPR

SEQ ID NO: 1367 - protein, 34 aa, Artificial Sequence; identical to SEQ ID NO: 256
  Description of Artificial Sequence: Ig kappa chain V region (D444) peptide 1
  MOD_RES (34)..(34): Lys-carbamidomethyl oxidation

SEQ ID NO: 1368 - protein, 15 aa, Artificial Sequence
  Description of Artificial Sequence: Ig kappa chain V region (D444) peptide 2
ASQSIGTDIHWYQQR

SEQ ID NO: 1369 - protein, 18 aa, Artificial Sequence
  Description of Artificial Sequence: Ig kappa chain V region (D444) peptide 3
DILLTQSPAILSVSPGER

SEQ ID NO: 1370 - protein, 11 aa, Artificial Sequence
  Description of Artificial Sequence: Ig kappa chain V region (D444) peptide 4
  MOD_RES (11)..(11): Lys-carbamidomethyl oxidation
HNSYTCEATHK

SEQ ID NO: 1371 - protein, 16 aa, Artificial Sequence
  Description of Artificial Sequence: Ig kappa chain V region (D444) peptide 5
LLIKYASESISGIPSR

SEQ ID NO: 1372 - protein, 35 aa, Artificial Sequence; identical to SEQ ID NO: 260
  Description of Artificial Sequence: Ig kappa chain V region (D444) peptide 6
  MOD_RES (35)..(35): Lys-carbamidomethyl oxidation

SEQ ID NO: 1373 - protein, 12 aa, Artificial Sequence
  Description of Artificial Sequence: Ig kappa chain V region (D444) peptide 7
YASESISGIPSR

SEQ ID NO: 1374 - protein, 18 aa, Artificial Sequence
  Description of Artificial Sequence: Ig kappa chain V region (hybridoma NC19-E11) peptide 1
ASQDIKSYLSWYQQKPWK

SEQ ID NO: 1375 - protein, 19 aa, Artificial Sequence
  Description of Artificial Sequence: Ig kappa chain V region (hybridoma NC19-E11) peptide 2
  MOD_RES (19)..(19): Methionin oxidation
DIKMTQSPSSMYASLGERM

SEQ ID NO: 1376 - protein, 20 aa, Artificial Sequence
  Description of Artificial Sequence: Ig kappa chain V region (hybridoma NC19-E11) peptide 3
  MOD_RES (19)..(20): Methionin oxidation
DIKMTQSPSSMYASLGERMM

SEQ ID NO: 1377 - protein, 16 aa, Artificial Sequence
  Description of Artificial Sequence: Ig kappa chain V region (hybridoma NC19-E11) peptide 4
  MOD_RES (16)..(16): Methionin oxidation
MTQSPSSMYASLGERM

SEQ ID NO: 1378 - protein, 17 aa, Artificial Sequence
  Description of Artificial Sequence: Ig kappa chain V region (hybridoma NC19-E11) peptide 5
  MOD_RES (16)..(17): Methionin oxidation
MTQSPSSMYASLGERMM

SEQ ID NO: 1379 - protein, 12 aa, Artificial Sequence
  Description of Artificial Sequence: Ig kappa chain V region (hybridoma NC19-E11) peptide 6
SYLSWYQQKPWK

SEQ ID NO: 1380 - protein, 15 aa, Artificial Sequence
  Description of Artificial Sequence: Ig kappa chain V region (hybridoma NC19-E11) peptide 7
SYLSWYQQKPWKSPK

SEQ ID NO: 1381 - protein, 16 aa, Artificial Sequence
  Description of Artificial Sequence: Ig kappa chain V region (hybridoma NC19-E11) peptide 8
TLIYYATSLADGVPSR

SEQ ID NO: 1382 - protein, 25 aa, Artificial Sequence
  Description of Artificial Sequence: Ig kappa chain V-III region PC 2880/PC 1229 peptide 1
ASESVDNYGISFMNWFQQKPGQPPK

SEQ ID NO: 1383 - protein, 26 aa, Artificial Sequence
  Description of Artificial Sequence: Ig kappa chain V-III region PC 2880/PC 1229 peptide 2
  MOD_RES (26)..(26): Methionin oxidation
ASESVDNYGISFMNWFQQKPGQPPKM

SEQ ID NO: 1384 - protein, 18 aa, Artificial Sequence
  Description of Artificial Sequence: Ig kappa chain V-III region PC 2880/PC 1229 peptide 3
DIVLTQSPASLAVSLGQR

SEQ ID NO: 1385 - protein, 11 aa, Artificial Sequence
  Description of Artificial Sequence: Ig kappa chain V-III region PC 2880/PC 1229 peptide 4
EVPWTFGGGTK

SEQ ID NO: 1386 - protein, 15 aa, Artificial Sequence
  Description of Artificial Sequence: Ig kappa chain V-III region PC 2880/PC 1229 peptide 5
EVPWTFGGGTKLEIK

SEQ ID NO: 1387 - protein, 16 aa, Artificial Sequence
  Description of Artificial Sequence: Ig kappa chain V-III region PC 2880/PC 1229 peptide 6
LLIYAASNQGSGVPAR

SEQ ID NO: 1388 - protein, 21 aa, Artificial Sequence
  Description of Artificial Sequence: Ig kappa chain V-region (V-Jk1) protein peptide 1
ASQDISNYLNWYQQKPDGTVK

SEQ ID NO: 1389 - protein, 19 aa, Artificial Sequence
  Description of Artificial Sequence: Ig kappa chain V-region (V-Jk1) protein peptide 2
  MOD_RES (19)..(19): Methionin oxidation
DIQMTQTTSSLSASLGDRM

SEQ ID NO: 1390 - protein, 24 aa, Artificial Sequence
  Description of Artificial Sequence: Ig kappa chain V-region (V-Jk1) protein peptide 3
  MOD_RES (24)..(24): Arg-carbamidomethyl oxidation
DIQMTQTTSSLSASLGDRVTISCR

SEQ ID NO: 1391 - protein, 25 aa, Artificial Sequence
  Description of Artificial Sequence: Ig kappa chain V-region (V-Jk1) protein peptide 4
  MOD_RES (25)..(25): Methionin oxidation-carbamidomethyl oxidation
DIQMTQTTSSLSASLGDRVTISCRM

SEQ ID NO: 1392 - protein, 35 aa, Artificial Sequence
  Description of Artificial Sequence: Ig kappa chain V-region (V-Jk1) protein peptide 5
  MOD_RES (35)..(35): Arg-carbamidomethyl oxidation
FSGSGSGTDYSLTISNLEQEDIATYFCQQGNTLPR

SEQ ID NO: 1393 - protein, 16 aa, Artificial Sequence
  Description of Artificial Sequence: Ig kappa chain V-region (V-Jk1) protein peptide 6
LLIYYTSRLHSGVPSR

SEQ ID NO: 1394 - protein, 11 aa, Artificial Sequence
  Description of Artificial Sequence: Ig kappa chain V-region (V-Jk1) protein peptide 7
TFGGGTKLEIK

SEQ ID NO: 1395 - protein, 34 aa, Artificial Sequence; identical to SEQ ID NO: 256
  Description of Artificial Sequence: Ig kappa light chain peptide 1
  MOD_RES (34)..(34): Lys-carbamidomethyl oxidation

SEQ ID NO: 1396 - protein, 11 aa, Artificial Sequence
  Description of Artificial Sequence: Ig kappa light chain peptide 2
ANRLVDGVPSR

SEQ ID NO: 1397 - protein, 18 aa, Artificial Sequence
  Description of Artificial Sequence: Ig kappa light chain peptide 3
DIKMTQSPSSMYASLGER

SEQ ID NO: 1398 - protein, 19 aa, Artificial Sequence
  Description of Artificial Sequence: Ig kappa light chain peptide 4
  MOD_RES (19)..(19): Methionin oxidation
DIKMTQSPSSMYASLGERM

SEQ ID NO: 1399 - protein, 20 aa, Artificial Sequence
  Description of Artificial Sequence: Ig kappa light chain peptide 5
  MOD_RES (19)..(20): Methionin oxidation
DIKMTQSPSSMYASLGERMM

SEQ ID NO: 1400 - protein, 11 aa, Artificial Sequence
  Description of Artificial Sequence: Ig kappa light chain peptide 6
  MOD_RES (11)..(11): Lys-carbamidomethyl oxidation
HNSYTCEATHK

SEQ ID NO: 1401 - protein, 19 aa, Artificial Sequence
  Description of Artificial Sequence: Ig kappa light chain peptide 7
  MOD_RES (19)..(19): Lys-carbamidomethyl oxidation
HNSYTCEATHKTSTSPIVK

SEQ ID NO: 1402 - protein, 15 aa, Artificial Sequence
  Description of Artificial Sequence: Ig kappa light chain peptide 8
MTQSPSSMYASLGER

SEQ ID NO: 1403 - protein, 16 aa, Artificial Sequence
  Description of Artificial Sequence: Ig kappa light chain peptide 9
  MOD_RES (16)..(16): Methionin oxidation
MTQSPSSMYASLGERM

SEQ ID NO: 1404 - protein, 17 aa, Artificial Sequence
  Description of Artificial Sequence: Ig kappa light chain peptide 10
  MOD_RES (16)..(17): Methionin oxidation
MTQSPSSMYASLGERMM

SEQ ID NO: 1405 - protein, 15 aa, Artificial Sequence
  Description of Artificial Sequence: Ig light chain V region (clone 185-c1) peptide 1
ASENIYSYLAWYQQK

SEQ ID NO: 1406 - protein, 25 aa, Artificial Sequence
  Description of Artificial Sequence: Ig light chain V region (clone 185-c1) peptide 2
  MOD_RES (25)..(25): Methionin oxidation-carbamidomethyl oxidation
DIQMTQSPASLSASVGETVTITCRM

SEQ ID NO: 1407 - protein, 13 aa, Artificial Sequence
  Description of Artificial Sequence: Ig light chain V region (clone 185-c1) peptide 3
FSGSGSGTQFSLK

SEQ ID NO: 1408 - protein, 13 aa, Artificial Sequence
  Description of Artificial Sequence: Ig light chain V region (clone 185-c1) peptide 4
QGKSPQLLVYNAK

SEQ ID NO: 1409 - protein, 10 aa, Artificial Sequence
  Description of Artificial Sequence: Ig light chain V region (clone 185-c1) peptide 5
SPQLLVYNAK

SEQ ID NO: 1410 - protein, 22 aa, Artificial Sequence
  Description of Artificial Sequence: Ig light chain V region (clone 185-c1) peptide 6
TLAEGVPSRFSGSGSGTQFSLK

SEQ ID NO: 1411 - protein, 34 aa, Artificial Sequence; identical to SEQ ID NO: 256
  Description of Artificial Sequence: Igg2a Fab Fragment (Fab 179) peptide 1
  MOD_RES (34)..(34): Lys-carbamidomethyl oxidation

SEQ ID NO: 1412 - protein, 19 aa, Artificial Sequence
  Description of Artificial Sequence: Igg2a Fab Fragment (Fab 179) peptide 2
  MOD_RES (19)..(19): Methionin oxidation
DIVMTQSPSSLTVTAGEKM

SEQ ID NO: 1413 - protein, 11 aa, Artificial Sequence
  Description of Artificial Sequence: Igg2a Fab Fragment (Fab 179) peptide 3
  MOD_RES (11)..(11): Lys-carbamidomethyl oxidation
HNSYTCEATHK

SEQ ID NO: 1414 - protein, 19 aa, Artificial Sequence
  Description of Artificial Sequence: Igg2a Fab Fragment (Fab 179) peptide 4
  MOD_RES (19)..(19): Lys-carbamidomethyl oxidation
HNSYTCEATHKTSTSPIVK

SEQ ID NO: 1415 - protein, 15 aa, Artificial Sequence
  Description of Artificial Sequence: Igg2a Fab Fragment (Fab 179) peptide 5
NYLTWYQQKPGQPPK

SEQ ID NO: 1416 - protein, 34 aa, Artificial Sequence; identical to SEQ ID NO: 256
  Description of Artificial Sequence: Igg2b, Kappa peptide 1
  MOD_RES (34)..(34): Lys-carbamidomethyl oxidation

SEQ ID NO: 1417 - protein, 21 aa, Artificial Sequence
  Description of Artificial Sequence: Igg2b, Kappa peptide 2
ASQDISNYLNWYQQKPDGTVK

SEQ ID NO: 1418 - protein, 18 aa, Artificial Sequence
  Description of Artificial Sequence: Igg2b, Kappa peptide 3
DIQMTQTTSSLSASLGDR

SEQ ID NO: 1419 - protein, 19 aa, Artificial Sequence
  Description of Artificial Sequence: Igg2b, Kappa peptide 4
  MOD_RES (19)..(19): Methionin oxidation
DIQMTQTTSSLSASLGDRM

SEQ ID NO: 1420 - protein, 24 aa, Artificial Sequence
  Description of Artificial Sequence: Igg2b, Kappa peptide 5
  MOD_RES (24)..(24): Arg-carbamidomethyl oxidation
DIQMTQTTSSLSASLGDRVTISCR

SEQ ID NO: 1421 - protein, 25 aa, Artificial Sequence
  Description of Artificial Sequence: Igg2b, Kappa peptide 6
  MOD_RES (25)..(25): Methionin oxidation-carbamidomethyl oxidation
DIQMTQTTSSLSASLGDRVTISCRM

SEQ ID NO: 1422 - protein, 20 aa, Artificial Sequence
  Description of Artificial Sequence: Igg2b, Kappa peptide 7
  MOD_RES (20)..(20): Methionin oxidation
DSTYSMSSTLTLTKDEYERM

SEQ ID NO: 1423 - protein, 11 aa, Artificial Sequence
  Description of Artificial Sequence: Igg2b, Kappa peptide 8
  MOD_RES (11)..(11): Lys-carbamidomethyl oxidation
HNSYTCEATHK

SEQ ID NO: 1424 - protein, 19 aa, Artificial Sequence
  Description of Artificial Sequence: Igg2b, Kappa peptide 9
  MOD_RES (19)..(19): Lys-carbamidomethyl oxidation
HNSYTCEATHKTSTSPIVK

SEQ ID NO: 1425 - protein, 8 aa, Artificial Sequence
  Description of Artificial Sequence: Igg2b, Kappa peptide 10
LLIYYTSR

SEQ ID NO: 1426 - protein, 14 aa, Artificial Sequence
  Description of Artificial Sequence: Igg2b, Kappa peptide 11
QNGVLNSWTDQDSK

SEQ ID NO: 1427 - protein, 11 aa, Artificial Sequence
  Description of Artificial Sequence: Igg2b, Kappa peptide 12
TFGGGTKLEIK

SEQ ID NO: 1428 - protein, 15 aa, Artificial Sequence
  Description of Artificial Sequence: Inter alpha-trypsin inhibitor, heavy chain 4 peptide 1
ADAVQEATFQVELPR

SEQ ID NO: 1429 - protein, 20 aa, Artificial Sequence
  Description of Artificial Sequence: Inter alpha-trypsin inhibitor, heavy chain 4 peptide 2
AHGGTNINNAVLLAVELLDR

SEQ ID NO: 1430 - protein, 30 aa, Artificial Sequence
  Description of Artificial Sequence: Inter alpha-trypsin inhibitor, heavy chain 4 peptide 3
AHGGTNINNAVLLAVELLDRSNQAELLPSK

SEQ ID NO: 1431 - protein, 15 aa, Artificial Sequence
  Description of Artificial Sequence: Inter alpha-trypsin inhibitor, heavy chain 4 peptide 4
DIVWEPPVEPDNTKR

SEQ ID NO: 1432 - protein, 10 aa, Artificial Sequence
  Description of Artificial Sequence: Inter alpha-trypsin inhibitor, heavy chain 4 peptide 5
FKPTLSQQQK

SEQ ID NO: 1433 - protein, 22 aa, Artificial Sequence
  Description of Artificial Sequence: Inter alpha-trypsin inhibitor, heavy chain 4 peptide 6
  MOD_RES (22)..(22): Methionin oxidation
GSEMVVAGKLQDQGPDVLLAKM

SEQ ID NO: 1434 - protein, 24 aa, Artificial Sequence
  Description of Artificial Sequence: Inter alpha-trypsin inhibitor, heavy chain 4 peptide 7
ILKDLSPQDQFNLIEFSGEANQWK

SEQ ID NO: 1435 - protein, 22 aa, Artificial Sequence
  Description of Artificial Sequence: Inter alpha-trypsin inhibitor, heavy chain 4 peptide 8
IRAHGGTNINNAVLLAVELLDR

SEQ ID NO: 1436 - protein, 13 aa, Artificial Sequence
  Description of Artificial Sequence: Inter alpha-trypsin inhibitor, heavy chain 4 peptide 9
ITFELIYQELLQR

SEQ ID NO: 1437 - protein, 14 aa, Artificial Sequence
  Description of Artificial Sequence: Inter alpha-trypsin inhibitor, heavy chain 4 peptide 10
ITFELIYQELLQRR

SEQ ID NO: 1438 - protein, 14 aa, Artificial Sequence
  Description of Artificial Sequence: Inter alpha-trypsin inhibitor, heavy chain 4 peptide 11
LFVDPSQGLEVTGK

SEQ ID NO: 1439 - protein, 15 aa, Artificial Sequence
  Description of Artificial Sequence: Inter alpha-trypsin inhibitor, heavy chain 4 peptide 12
LPLAAQAHPFRPPVR

SEQ ID NO: 1440 - protein, 14 aa, Artificial Sequence
  Description of Artificial Sequence: Inter alpha-trypsin inhibitor, heavy chain 4 peptide 13
LWALLTIQQQLEQR

SEQ ID NO: 1441 - protein, 22 aa, Artificial Sequence
  Description of Artificial Sequence: Inter alpha-trypsin inhibitor, heavy chain 4 peptide 14
  MOD_RES (22)..(22): Methionin oxidation
MLSLPSVAQYPADPHLVVTEKM

SEQ ID NO: 1442 - protein, 7 aa, Artificial Sequence
  Description of Artificial Sequence: Inter alpha-trypsin inhibitor, heavy chain 4 peptide 15
NTEYKWK

SEQ ID NO: 1443 - protein, 20 aa, Artificial Sequence
  Description of Artificial Sequence: Inter alpha-trypsin inhibitor, heavy chain 4 peptide 16
QSLVQATEENLNKAVNYASR

SEQ ID NO: 1444 - protein, 16 aa, Artificial Sequence
  Description of Artificial Sequence: Inter alpha-trypsin inhibitor, heavy chain 4 peptide 17
QTEKFEVSVNVAPGSK

SEQ ID NO: 1445 - protein, 16 aa, Artificial Sequence
  Description of Artificial Sequence: Inter alpha-trypsin inhibitor, heavy chain 4 peptide 18
QYSAAVGRGESAGIVK

SEQ ID NO: 1446 - protein, 10 aa, Artificial Sequence
  Description of Artificial Sequence: Inter alpha-trypsin inhibitor, heavy chain 4 peptide 19
RLGMYELLLK

SEQ ID NO: 1447 - protein, 11 aa, Artificial Sequence
  Description of Artificial Sequence: Inter alpha-trypsin inhibitor, heavy chain 4 peptide 20
  MOD_RES (11)..(11): Methionin oxidation
RLGMYELLLKM

SEQ ID NO: 1448 - protein, 16 aa, Artificial Sequence
  Description of Artificial Sequence: Inter alpha-trypsin inhibitor, heavy chain 4 peptide 21
SQSEQDTVLNGDFIVR

SEQ ID NO: 1449 - protein, 28 aa, Artificial Sequence
  Description of Artificial Sequence: Inter alpha-trypsin inhibitor, heavy chain 4 peptide 22
SVSLIILLTDGDPTVGETNPTIIQNNVR

SEQ ID NO: 1450 - protein, 10 aa, Artificial Sequence
  Description of Artificial Sequence: Inter alpha-trypsin inhibitor, heavy chain 4 peptide 23
TLFSVLPGLK

SEQ ID NO: 1451 - protein, 13 aa, Artificial Sequence
  Description of Artificial Sequence: Inter alpha-trypsin inhibitor, heavy chain 4 peptide 24
TVKVQGVDYLATR

SEQ ID NO: 1452 - protein, 10 aa, Artificial Sequence
  Description of Artificial Sequence: Inter alpha-trypsin inhibitor, heavy chain 4 peptide 25
VQGVDYLATR

SEQ ID NO: 1453 - protein, 19 aa, Artificial Sequence
  Description of Artificial Sequence: Inter alpha-trypsin inhibitor, heavy chain 4 peptide 26
VVNRADAVQEATFQVELPR

SEQ ID NO: 1454 - protein, 9 aa, Artificial Sequence
  Description of Artificial Sequence: Inter alpha-trypsin inhibitor, heavy chain 4 peptide 27
YIFHNFMER

SEQ ID NO: 1455 - protein, 10 aa, Artificial Sequence
  Description of Artificial Sequence: Inter alpha-trypsin inhibitor, heavy chain 4 peptide 28
  MOD_RES (10)..(10): Methionin oxidation
YIFHNFMERM

SEQ ID NO: 1456 - protein, 8 aa, Artificial Sequence
  Description of Artificial Sequence: Inter alpha-trypsin inhibitor, heavy chain 4 peptide 29
YKFQHHFK

SEQ ID NO: 1457 - protein, 11 aa, Artificial Sequence
  Description of Artificial Sequence: Leucine-rich alpha-2-glycoprotein peptide 1
  MOD_RES (11)..(11): Arg-carbamidomethyl oxidation
CAGPEAMKGQR

SEQ ID NO: 1458 - protein, 12 aa, Artificial Sequence
  Description of Artificial Sequence: Leucine-rich alpha-2-glycoprotein peptide 2
  MOD_RES (11)..(11): Arg-carbamidomethyl oxidation
  MOD_RES (12)..(12): Methionin oxidation
CAGPEAMKGQRM

SEQ ID NO: 1459 - protein, 25 aa, Artificial Sequence
  Description of Artificial Sequence: Leucine-rich alpha-2-glycoprotein peptide 3
  MOD_RES (25)..(25): Methionin oxidation-carbamidomethyl oxidation-carbamidomethyl oxidation
DMQDGFDISHNPWICDKNLADLCRM

SEQ ID NO: 1460 - protein, 22 aa, Artificial Sequence
  Description of Artificial Sequence: Leucine-rich alpha-2-glycoprotein peptide 4
ELHLSSNRLQALSPELLAPVPR

SEQ ID NO: 1461 - protein, 13 aa, Artificial Sequence
  Description of Artificial Sequence: Leucine-rich alpha-2-glycoprotein peptide 5
LEDSLLAPQPFLR

SEQ ID NO: 1462 - protein, 10 aa, Artificial Sequence
  Description of Artificial Sequence: Leucine-rich alpha-2-glycoprotein peptide 6
LHLEGNRLQR

SEQ ID NO: 1463 - protein, 14 aa, Artificial Sequence
  Description of Artificial Sequence: Leucine-rich alpha-2-glycoprotein peptide 7
LQALSPELLAPVPR

SEQ ID NO: 1464 - protein, 16 aa, Artificial Sequence
  Description of Artificial Sequence: Leucine-rich alpha-2-glycoprotein peptide 8
LQRLEDSLLAPQPFLR

SEQ ID NO: 1465 - protein, 17 aa, Artificial Sequence
  Description of Artificial Sequence: Lifr protein (leukemia inhibitory factor receptor) peptide 1
AEIQLSKNDYIISVVAR

SEQ ID NO: 1466 - protein, 23 aa, Artificial Sequence
  Description of Artificial Sequence: Lifr protein (leukemia inhibitory factor receptor) peptide 2
GAEDSTYHVAVDKLNPYTAYTFR

SEQ ID NO: 1467 - protein, 16 aa, Artificial Sequence
  Description of Artificial Sequence: Lifr protein (leukemia inhibitory factor receptor) peptide 3
HLTTEATPSKGPDTWR

SEQ ID NO: 1468 - protein, 23 aa, Artificial Sequence
  Description of Artificial Sequence: Lifr protein (leukemia inhibitory factor receptor) peptide 4
  MOD_RES (23)..(23): Methionin oxidation
IASMEIPNDDITVEQAVGLGNRM

SEQ ID NO: 1469 - protein, 11 aa, Artificial Sequence
  Description of Artificial Sequence: Lifr protein (leukemia inhibitory factor receptor) peptide 5
  MOD_RES (11)..(11): Lys-carbamidomethyl oxidation-carbamidomethyl oxidation
INLLCQIEICK

SEQ ID NO: 1470 - protein, 19 aa, Artificial Sequence
  Description of Artificial Sequence: Lifr protein (leukemia inhibitory factor receptor) peptide 7
  MOD_RES (19)..(19): Arg-carbamidomethyl oxidation-carbamidomethyl oxidation
LSCETHDLKEIICSWNPGR

SEQ ID NO: 1471 - protein, 10 aa, Artificial Sequence
  Description of Artificial Sequence: Lifr protein (leukemia inhibitory factor receptor) peptide 8
NDYIISVVAR

SEQ ID NO: 1472 - protein, 13 aa, Artificial Sequence
  Description of Artificial Sequence: Lifr protein (leukemia inhibitory factor receptor) peptide 9
NTEYTLFESISGK

SEQ ID NO: 1473 - protein, 9 aa, Artificial Sequence
  Description of Artificial Sequence: Lifr protein (leukemia inhibitory factor receptor) peptide 10
  MOD_RES (9)..(9): Arg-carbamidomethyl oxidation
SEPCLLDWR

SEQ ID NO: 1474 - protein, 17 aa, Artificial Sequence
  Description of Artificial Sequence: Lifr protein (leukemia inhibitory factor receptor) peptide 11
  MOD_RES (17)..(17): Arg-carbamidomethyl oxidation
YNFYLYGCTNQGYQLLR

SEQ ID NO: 1475 - protein, 18 aa, Artificial Sequence
  Description of Artificial Sequence: Major urinary protein 1 peptide 1
AGEYSVTYDGFNTFTIPK

SEQ ID NO: 1476 - protein, 14 aa, Artificial Sequence
  Description of Artificial Sequence: Major urinary protein 1 peptide 2
  MOD_RES (14)..(14): Methionin oxidation
DGETFQLMGLYGRM

SEQ ID NO: 1477 - protein, 14 aa, Artificial Sequence
  Description of Artificial Sequence: Major urinary protein 1 peptide 3
EEASSTGRNFNVEK

SEQ ID NO: 1478 - protein, 10 aa, Artificial Sequence
  Description of Artificial Sequence: Major urinary protein 1 peptide 4
EKIEDNGNFR

SEQ ID NO: 1479 - protein, 11 aa, Artificial Sequence
  Description of Artificial Sequence: Major urinary protein 1 peptide 5
ENIIDLSNANR

SEQ ID NO: 1480 - protein, 12 aa, Artificial Sequence
  Description of Artificial Sequence: Major urinary protein 1 peptide 6
  MOD_RES (12)..(12): Arg-carbamidomethyl oxidation
FAQLCEEHGILR

SEQ ID NO: 1481 - protein, 23 aa, Artificial Sequence
  Description of Artificial Sequence: Major urinary protein 1 peptide 7
  MOD_RES (23)..(23): Arg-carbamidomethyl oxidation
FAQLCEEHGILRENIIDLSNANR

SEQ ID NO: 1482 - protein, 19 aa, Artificial Sequence
  Description of Artificial Sequence: Major urinary protein 1 peptide 8
IEDNGNFRLFLEQIHVLEK

SEQ ID NO: 1483 - protein, 15 aa, Artificial Sequence
  Description of Artificial Sequence: Major urinary protein 1 peptide 9
INGEWHTIILASDKR

SEQ ID NO: 1484 - protein, 11 aa, Artificial Sequence
  Description of Artificial Sequence: Major urinary protein 1 peptide 10
LFLEQIHVLEK

SEQ ID NO: 1485 - protein, 16 aa, Artificial Sequence
  Description of Artificial Sequence: Major urinary protein 1 peptide 11
  MOD_RES (16)..(16): Methionin oxidation
TDYDNFLMAHLINEKM

SEQ ID NO: 1486 - protein, 14 aa, Artificial Sequence
  Description of Artificial Sequence: Mannose binding lectin (A) peptide 1
AIEEKLANMEAEIR

SEQ ID NO: 1487 - protein, 15 aa, Artificial Sequence
  Description of Artificial Sequence: Mannose binding lectin (A) peptide 2
  MOD_RES (15)..(15): Methionin oxidation
AIEEKLANMEAEIRM

SEQ ID NO: 1488 - protein, 31 aa, Artificial Sequence
  Description of Artificial Sequence: Mannose binding lectin (A) peptide 3
  MOD_RES (31)..(31): Methionin oxidation
AIQEVATGIAFLGITDEATEGQFMYVTGGRM

SEQ ID NO: 1489 - protein, 16 aa, Artificial Sequence
  Description of Artificial Sequence: Mannose binding lectin (A) peptide 4
GEPGQGLRGLQGPPGK

SEQ ID NO: 1490 - protein, 10 aa, Artificial Sequence
  Description of Artificial Sequence: Mannose binding lectin (A) peptide 5
  MOD_RES (10)..(10): Methionin oxidation
LANMEAEIRM

SEQ ID NO: 1491 - protein, 14 aa, Artificial Sequence
  Description of Artificial Sequence: Mannose binding lectin (A) peptide 6
  MOD_RES (14)..(14): Methionin oxidation
LFVTNHEKMPFSKM

SEQ ID NO: 1492 - protein, 15 aa, Artificial Sequence
  Description of Artificial Sequence: Mannose binding lectin (A) peptide 7
  MOD_RES (15)..(15): Methionin oxidation
LQLTNKLHAFSMGKM

SEQ ID NO: 1493 - protein, 14 aa, Artificial Sequence
  Description of Artificial Sequence: Mannose binding lectin (A) peptide 8
  MOD_RES (14)..(14): Arg-carbamidomethyl oxidation
SLCTELQGTVAIPR

SEQ ID NO: 1494 - protein, 20 aa, Artificial Sequence
  Description of Artificial Sequence: Mannose binding lectin (A) peptide 9
  MOD_RES (20)..(20): Lys-carbamidomethyl oxidation
SLCTELQGTVAIPRNAEENK

SEQ ID NO: 1495 - protein, 16 aa, Artificial Sequence
  Description of Artificial Sequence: Mannose binding lectin (A) peptide 10
  MOD_RES (16)..(16): Arg-carbamidomethyl oxidation
VKSLCTELQGTVAIPR

SEQ ID NO: 1496 - protein, 16 aa, Artificial Sequence
  Description of Artificial Sequence: Mannose binding protein C peptide 1
AEFDTSEIDSEIAALR

SEQ ID NO: 1497 - protein, 20 aa, Artificial Sequence
  Description of Artificial Sequence: Mannose binding protein C peptide 2
AEFDTSEIDSEIAALRSELR

SEQ ID NO: 1498 - protein, 14 aa, Artificial Sequence
  Description of Artificial Sequence: Mannose binding protein C peptide 3
  MOD_RES (14)..(14): Arg-carbamidomethyl oxidation
ALCSEFQGSVATPR

SEQ ID NO: 1499 - protein, 13 aa, Artificial Sequence
  Description of Artificial Sequence: Mannose binding protein C peptide 4
ALRNWVLFSLSEK

SEQ ID NO: 1500 - protein, 11 aa, Artificial Sequence
  Description of Artificial Sequence: Mannose binding protein C peptide 5
DIAYLGITDVR

SEQ ID NO: 1501 - protein, 23 aa, Artificial Sequence
  Description of Artificial Sequence: Mannose binding protein C peptide 6
DIAYLGITDVRVEGSFEDLTGNR

SEQ ID NO: 1502 - protein, 10 aa, Artificial Sequence
  Description of Artificial Sequence: Mannose binding protein C peptide 7
NWVLFSLSEK

SEQ ID NO: 1503 - protein, 14 aa, Artificial Sequence
  Description of Artificial Sequence: Mannose binding protein C peptide 8
VAKDIAYLGITDVR

SEQ ID NO: 1504 - protein, 12 aa, Artificial Sequence
  Description of Artificial Sequence: Mannose binding protein C peptide 9
VEGSFEDLTGNR

SEQ ID NO: 1505 - protein, 14 aa, Artificial Sequence
  Description of Artificial Sequence: Mannose binding protein C peptide 10
VEGSFEDLTGNRVR

SEQ ID NO: 1506 - protein, 16 aa, Artificial Sequence
  Description of Artificial Sequence: Mannose binding protein C peptide 11
  MOD_RES (16)..(16): Arg-carbamidomethyl oxidation
VKALCSEFQGSVATPR

SEQ ID NO: 1507 - protein, 18 aa, Artificial Sequence
  Description of Artificial Sequence: Mannose binding protein C peptide 12
  MOD_RES (18)..(18): Asp-carbamidomethyl oxidation-carbamidomethyl oxidation
WNDVPCSDSFLAICEFSD

SEQ ID NO: 1508 - protein, 26 aa, Artificial Sequence
  Description of Artificial Sequence: Mannose binding protein C peptide 13
  MOD_RES (26)..(26): Lys-carbamidomethyl oxidation
YTNWNDGEPNNTGDGEDCVVILGNGK

SEQ ID NO: 1509 - protein, 13 aa, Artificial Sequence
  Description of Artificial Sequence: MHC class I histocompatibility antigen H-2 Q10 alpha chain peptide 1
AKGNEQSFHVSLR

SEQ ID NO: 1510 - protein, 14 aa, Artificial Sequence
  Description of Artificial Sequence: MHC class I histocompatibility antigen H-2 Q10 alpha chain peptide 2
APWMEQEGPEYWER

SEQ ID NO: 1511 - protein, 15 aa, Artificial Sequence
  Description of Artificial Sequence: MHC class I histocompatibility antigen H-2 Q10 alpha chain peptide 3
  MOD_RES (15)..(15): Methionin oxidation
APWMEQEGPEYWERM

SEQ ID NO: 1512 - protein, 18 aa, Artificial Sequence
  Description of Artificial Sequence: MHC class I histocompatibility antigen H-2 Q10 alpha chain peptide 4
APWMEQEGPEYWERETQR

SEQ ID NO: 1513 - protein, 19 aa, Artificial Sequence
  Description of Artificial Sequence: MHC class I histocompatibility antigen H-2 Q10 alpha chain peptide 5
  MOD_RES (19)..(19): Methionin oxidation
APWMEQEGPEYWERETQRM

SEQ ID NO: 1514 - protein, 13 aa, Artificial Sequence
  Description of Artificial Sequence: MHC class I histocompatibility antigen H-2 Q10 alpha chain peptide 6
  MOD_RES (13)..(13): Arg-carbamidomethyl oxidation
AYLEAECVEWLLR

SEQ ID NO: 1515 - protein, 13 aa, Artificial Sequence
  Description of Artificial Sequence: MHC class I histocompatibility antigen H-2 Q10 alpha chain peptide 7
FDSDAETPRMEPR

SEQ ID NO: 1516 - protein, 14 aa, Artificial Sequence
  Description of Artificial Sequence: MHC class I histocompatibility antigen H-2 Q10 alpha chain peptide 8
  MOD_RES (14)..(14): Methionin oxidation
FDSDAETPRMEPRM

SEQ ID NO: 1517 - protein, 14 aa, Artificial Sequence
  Description of Artificial Sequence: MHC class I histocompatibility antigen H-2 Q10 alpha chain peptide 9
FIIVGYVDDTQFVR

SEQ ID NO: 1518 - protein, 23 aa, Artificial Sequence
  Description of Artificial Sequence: MHC class I histocompatibility antigen H-2 Q10 alpha chain peptide 10
FIIVGYVDDTQFVRFDSDAETPR

SEQ ID NO: 1519 - protein, 11 aa, Artificial Sequence
  Description of Artificial Sequence: MHC class I histocompatibility antigen H-2 Q10 alpha chain peptide 11
GNEQSFHVSLR

SEQ ID NO: 1520 - protein, 10 aa, Artificial Sequence
  Description of Artificial Sequence: MHC class I histocompatibility antigen H-2 Q10 alpha chain peptide 12
GYLQYAYDGR

SEQ ID NO: 1521 - protein, 20 aa, Artificial Sequence
  Description of Artificial Sequence: MHC class I histocompatibility antigen H-2 Q10 alpha chain peptide 13
GYLQYAYDGRDYIALNEDLK

SEQ ID NO: 1522 - protein, 12 aa, Artificial Sequence
  Description of Artificial Sequence: MHC class I histocompatibility antigen H-2 Q10 alpha chain peptide 14
KWEQAGAAEYYR

SEQ ID NO: 1523 - protein, 21 aa, Artificial Sequence
  Description of Artificial Sequence: MHC class I histocompatibility antigen H-2 Q10 alpha chain peptide 15
TDPPKTHVTHHPGSEGDVTLR

SEQ ID NO: 1524 - protein, 16 aa, Artificial Sequence
  Description of Artificial Sequence: MHC class I histocompatibility antigen H-2 Q10 alpha chain peptide 16
THVTHHPGSEGDVTLR

SEQ ID NO: 1525 - protein, 13 aa, Artificial Sequence
  Description of Artificial Sequence: MHC class I histocompatibility antigen H-2 Q10 alpha chain peptide 17
TWTAADVAAIITR

SEQ ID NO: 1526 - protein, 10 aa, Artificial Sequence
  Description of Artificial Sequence: MHC class I histocompatibility antigen H-2 Q10 alpha chain peptide 18
WASVVVPLGK

SEQ ID NO: 1527 - protein, 11 aa, Artificial Sequence
  Description of Artificial Sequence: MHC class I histocompatibility antigen H-2 Q10 alpha chain peptide 19
WEQAGAAEYYR

SEQ ID NO: 1528 - protein, 15 aa, Artificial Sequence
  Description of Artificial Sequence: MHC class I histocompatibility antigen H-2 Q10 alpha chain peptide 20
YFETSVSRPGLGEPR

SEQ ID NO: 1529 - protein, 11 aa, Artificial Sequence
  Description of Artificial Sequence: MHC class I histocompatibility antigen H-2 Q10 alpha chain peptide 21
YLELGKETLLR

SEQ ID NO: 1530 - protein, 16 aa, Artificial Sequence
  Description of Artificial Sequence: MHC factor B peptide 1
AEGIPEFYDYDVALVK

SEQ ID NO: 1531 - protein, 9 aa, Artificial Sequence
  Description of Artificial Sequence: MHC factor B peptide 2
ALFVSEQGK

SEQ ID NO: 1532 - protein, 10 aa, Artificial Sequence
  Description of Artificial Sequence: MHC factor B peptide 3
ALLDIGRDPK

SEQ ID NO: 1533 - protein, 11 aa, Artificial Sequence
  Description of Artificial Sequence: MHC factor B peptide 4
  MOD_RES (11)..(11): Lys-carbamidomethyl oxidation
ALRLPQTATCK

SEQ ID NO: 1534 - protein, 8 aa, Artificial Sequence
  Description of Artificial Sequence: MHC factor B peptide 5
  MOD_RES (8)..(8): Lys-carbamidomethyl oxidation
CLTNLIEK

SEQ ID NO: 1535 - protein, 8 aa, Artificial Sequence
  Description of Artificial Sequence: MHC factor B peptide 6
DNEHHVFK

SEQ ID NO: 1536 - protein, 16 aa, Artificial Sequence
  Description of Artificial Sequence: MHC factor B peptide 7
  MOD_RES (16)..(16): Arg-carbamidomethyl oxidation
FIQVGVISWGVVDVCR

SEQ ID NO: 1537 - protein, 17 aa, Artificial Sequence
  Description of Artificial Sequence: MHC factor B peptide 8
  MOD_RES (17)..(17): Lys-carbamidomethyl oxidation-carbamidomethyl oxidation
FLCTGGVDPYADPNTCK

SEQ ID NO: 1538 - protein, 12 aa, Artificial Sequence
  Description of Artificial Sequence: MHC factor B peptide 9
GDSGGPLIVHKR

SEQ ID NO: 1539 - protein, 12 aa, Artificial Sequence
  Description of Artificial Sequence: MHC factor B peptide 10
GNDYHKQPWQAK

SEQ ID NO: 1540 - protein, 26 aa, Artificial Sequence
  Description of Artificial Sequence: MHC factor B peptide 11
  MOD_RES (26)..(26): Methionin oxidation
HVIIIMTDGLHNMGGNPVTVIQDIRM

SEQ ID NO: 1541 - protein, 27 aa, Artificial Sequence
  Description of Artificial Sequence: MHC factor B peptide 12
  MOD_RES (26)..(27): Methionin oxidation
HVIIIMTDGLHNMGGNPVTVIQDIRMM

SEQ ID NO: 1542 - protein, 8 aa, Artificial Sequence
  Description of Artificial Sequence: MHC factor B peptide 13
ISVTRPLK

SEQ ID NO: 1543 - protein, 17 aa, Artificial Sequence
  Description of Artificial Sequence: MHC factor B peptide 14
KAEGIPEFYDYDVALVK

SEQ ID NO: 1544 - protein, 9 aa, Artificial Sequence
  Description of Artificial Sequence: MHC factor B peptide 15
KDNEHHVFK

SEQ ID NO: 1545 - protein, 9 aa, Artificial Sequence
  Description of Artificial Sequence: MHC factor B peptide 16
LKDEDLGFL

SEQ ID NO: 1546 - protein, 20 aa, Artificial Sequence
  Description of Artificial Sequence: MHC factor B peptide 17
  MOD_RES (20)..(20): Arg-carbamidomethyl oxidation-carbamidomethyl oxidation
LKYGQTLRPICLPCTEGTTR

SEQ ID NO: 1547 - protein, 12 aa, Artificial Sequence
  Description of Artificial Sequence: MHC factor B peptide 18
LNQISYEDHKLK

SEQ ID NO: 1548 - protein, 9 aa, Artificial Sequence
  Description of Artificial Sequence: MHC factor B peptide 19
  MOD_RES (9)..(9): Lys-carbamidomethyl oxidation
RCLTNLIEK

SEQ ID NO: 1549 - protein, 13 aa, Artificial Sequence
  Description of Artificial Sequence: MHC factor B peptide 20
RDLEIEEVLFHPK

SEQ ID NO: 1550 - protein, 12 aa, Artificial Sequence
  Description of Artificial Sequence: MHC factor B peptide 21
  MOD_RES (12)..(12): Lys-carbamidomethyl oxidation
SLSLCGMVWEHK

SEQ ID NO: 1551 - protein, 13 aa, Artificial Sequence
  Description of Artificial Sequence: MHC factor B peptide 22
  MOD_RES (12)..(12): Lys-carbamidomethyl oxidation
  MOD_RES (13)..(13): Methionin oxidation
SLSLCGMVWEHKM

SEQ ID NO: 1552 - protein, 13 aa, Artificial Sequence
  Description of Artificial Sequence: MHC factor B peptide 23
  MOD_RES (13)..(13): Lys-carbamidomethyl oxidation
SLSLCGMVWEHKK

SEQ ID NO: 1553 - protein, 14 aa, Artificial Sequence
  Description of Artificial Sequence: MHC factor B peptide 24
  MOD_RES (13)..(13): Lys-carbamidomethyl oxidation
  MOD_RES (14)..(14): Methionin oxidation
SLSLCGMVWEHKKM

SEQ ID NO: 1554 - protein, 9 aa, Artificial Sequence
  Description of Artificial Sequence: MHC factor B peptide 25
VASYGVRPR

SEQ ID NO: 1555 - protein, 11 aa, Artificial Sequence
  Description of Artificial Sequence: MHC factor B peptide 26
VKDASEVVTPR

SEQ ID NO: 1556 - protein, 21 aa, Artificial Sequence
  Description of Artificial Sequence: MHC factor B peptide 27
  MOD_RES (20)..(21): Methionin oxidation
VKDMEDLENVFYQMIDETKMM

SEQ ID NO: 1557 - protein, 8 aa, Artificial Sequence
  Description of Artificial Sequence: MHC factor B peptide 28
VSVGGQRR

SEQ ID NO: 1558 - protein, 11 aa, Artificial Sequence
  Description of Artificial Sequence: MHC factor B peptide 29
YGLLTYATVPK

SEQ ID NO: 1559 - protein, 18 aa, Artificial Sequence
  Description of Artificial Sequence: MHC factor B peptide 30
  MOD_RES (18)..(18): Arg-carbamidomethyl oxidation-carbamidomethyl oxidation
YGQTLRPICLPCTEGTTR

SEQ ID NO: 1560 - protein, 18 aa, Artificial Sequence
  Description of Artificial Sequence: Murine valosin- containing protein peptide 1
  MOD_RES (18)..(18): Arg-carbamidomethyl oxidation-carbamidomethyl oxidation
EAVCIVLSDDTCSDEKIR

SEQ ID NO: 1561 - protein, 18 aa, Artificial Sequence
  Description of Artificial Sequence: Murine valosin- containing protein peptide 2
ELQELVQYPVEHPDKFLK

SEQ ID NO: 1562 - protein, 21 aa, Artificial Sequence
  Description of Artificial Sequence: Murine valosin- containing protein peptide 3
EVDIGIPDATGRLEILQIHTK

SEQ ID NO: 1563 - protein, 12 aa, Artificial Sequence
  Description of Artificial Sequence: Murine valosin- containing protein peptide 4
GILLYGPPGTGK

SEQ ID NO: 1564 - protein, 12 aa, Artificial Sequence
  Description of Artificial Sequence: Murine valosin- containing protein peptide 5
  MOD_RES (12)..(12): Lys-carbamidomethyl oxidation
GVLFYGPPGCGK

SEQ ID NO: 1565 - protein, 13 aa, Artificial Sequence
  Description of Artificial Sequence: Murine valosin- containing protein peptide 6
IVSQLLTLMDGLK

SEQ ID NO: 1566 - protein, 15 aa, Artificial Sequence
  Description of Artificial Sequence: Murine valosin- containing protein peptide 7
IVSQLLTLMDGLKQR

SEQ ID NO: 1567 - protein, 16 aa, Artificial Sequence
  Description of Artificial Sequence: Murine valosin- containing protein peptide 8
  MOD_RES (16)..(16): Methionin oxidation
IVSQLLTLMDGLKQRM

SEQ ID NO: 1568 - protein, 14 aa, Artificial Sequence
  Description of Artificial Sequence: Murine valosin- containing protein peptide 9
  MOD_RES (14)..(14): Methionin oxidation
KYEMFAQTLQQSRM

SEQ ID NO: 1569 - protein, 17 aa, Artificial Sequence
  Description of Artificial Sequence: Murine valosin- containing protein peptide 10
  MOD_RES (17)..(17): Methionin oxidation-carbamidomethyl oxidation
MTNGFSGADLTEICQRM

SEQ ID NO: 1570 - protein, 17 aa, Artificial Sequence
  Description of Artificial Sequence: Murine valosin- containing protein peptide 11
  MOD_RES (17)..(17): Lys-carbamidomethyl oxidation
QAAPCVLFFDELDSIAK

SEQ ID NO: 1571 - protein, 12 aa, Artificial Sequence
  Description of Artificial Sequence: Murine valosin- containing protein peptide 12
WALSQSNPSALR

SEQ ID NO: 1572 - protein, 19 aa, Artificial Sequence
  Description of Artificial Sequence: Orosomucoid 1 peptide 1
  MOD_RES (19)..(19): Methionin oxidation
AVTHVGMDESEIIFVDWKM

SEQ ID NO: 1573 - protein, 19 aa, Artificial Sequence
  Description of Artificial Sequence: Orosomucoid 1 peptide 2
AVTHVGMDESEIIFVDWKK

SEQ ID NO: 1574 - protein, 20 aa, Artificial Sequence
  Description of Artificial Sequence: Orosomucoid 1 peptide 3
  MOD_RES (20)..(20): Methionin oxidation
AVTHVGMDESEIIFVDWKKM

SEQ ID NO: 1575 - protein, 14 aa, Artificial Sequence
  Description of Artificial Sequence: Orosomucoid 1 peptide 4
HGAFMLAFDLKDEK

SEQ ID NO: 1576 - protein, 15 aa, Artificial Sequence
  Description of Artificial Sequence: Orosomucoid 1 peptide 5
  MOD_RES (15)..(15): Methionin oxidation
HGAFMLAFDLKDEKM

SEQ ID NO: 1577 - protein, 9 aa, Artificial Sequence
  Description of Artificial Sequence: Orosomucoid 1 peptide 6
RPDITPELR

SEQ ID NO: 1578 - protein, 14 aa, Artificial Sequence
  Description of Artificial Sequence: Orosomucoid 1 peptide 7
RPDITPELREVFQK

SEQ ID NO: 1579 - protein, 9 aa, Artificial Sequence
  Description of Artificial Sequence: Orosomucoid 1 peptide 8
WFFMGAAFR

SEQ ID NO: 1580 - protein, 10 aa, Artificial Sequence
  Description of Artificial Sequence: Orosomucoid 1 peptide 9
  MOD_RES (10)..(10): Methionin oxidation
WFFMGAAFRM

SEQ ID NO: 1581 - protein, 15 aa, Artificial Sequence
  Description of Artificial Sequence: Orosomucoid 1 peptide 10
YEGGVETFAHLIVLR

SEQ ID NO: 1582 - protein, 16 aa, Artificial Sequence
  Description of Artificial Sequence: Orosomucoid 1 peptide 11
YEGGVETFAHLIVLRK

SEQ ID NO: 1583 - protein, 10 aa, Mus musculus
  MOD_RES (10)..(10): Arg-carbamidomethyl oxidation-carbamidomethyl oxidation
CEGETDFVCR

SEQ ID NO: 1584 - protein, 11 aa, Mus musculus
  MOD_RES (11)..(11): Arg-carbamidomethyl oxidation
CQSWAAMFPHR

SEQ ID NO: 1585 - protein, 12 aa, Mus musculus
  MOD_RES (11)..(11): Arg-carbamidomethyl oxidation
  MOD_RES (12)..(12): Methionin oxidation
CQSWAAMFPHRM

SEQ ID NO: 1586 - protein, 14 aa, Mus musculus
  MOD_RES (14)..(14): Lys-carbamidomethyl oxidation
CQSWAAMFPHRHSK

SEQ ID NO: 1587 - protein, 15 aa, Mus musculus
  MOD_RES (14)..(14): Lys-carbamidomethyl oxidation
  MOD_RES (15)..(15): Methionin oxidation
CQSWAAMFPHRHSKM

SEQ ID NO: 1588 - protein, 16 aa, Mus musculus
  MOD_RES (16)..(16): Lys-carbamidomethyl oxidation-carbamidomethyl oxidation
CTTPPPPPSPTYQCLK

SEQ ID NO: 1589 - protein, 26 aa, Mus musculus
  MOD_RES (26)..(26): Lys-carbamidomethyl oxidation-carbamidomethyl oxidation
FTGQHFCGGTLIAPEWVLTAAHCLEK

SEQ ID NO: 1590 - protein, 10 aa, Mus musculus
FVDWIEREMR

SEQ ID NO: 1591 - protein, 11 aa, Mus musculus
  MOD_RES (11)..(11): Methionin oxidation
FVDWIEREMRM

SEQ ID NO: 1592 - protein, 15 aa, Mus musculus
GENYRGTVSVTVSGK

SEQ ID NO: 1593 - protein, 22 aa, Mus musculus
  MOD_RES (22)..(22): Arg-carbamidomethyl oxidation
GKTAVTAAGTPCQGWAAQEPHR

SEQ ID NO: 1594 - protein, 11 aa, Mus musculus
  MOD_RES (11)..(11): Lys-carbamidomethyl oxidation
HNRTPENFPCK

SEQ ID NO: 1595 - protein, 11 aa, Mus musculus
HSIFTPQTNPR

SEQ ID NO: 1596 - protein, 19 aa, Mus musculus
  MOD_RES (19)..(19): Arg-carbamidomethyl oxidation
HSKTPENFPDAGLEMNYCR

SEQ ID NO: 1597 - protein, 20 aa, Mus musculus
  MOD_RES (20)..(20): Methionin oxidation-carbamidomethyl oxidation
HSKTPENFPDAGLEMNYCRM

SEQ ID NO: 1598 - protein, 12 aa, Mus musculus
  MOD_RES (12)..(12): Arg-carbamidomethyl oxidation
KCQSWAAMFPHR

SEQ ID NO: 1599 - protein, 13 aa, Mus musculus
  MOD_RES (12)..(12): Arg-carbamidomethyl oxidation
  MOD_RES (13)..(13): Methionin oxidation
KCQSWAAMFPHRM

SEQ ID NO: 1600 - protein, 14 aa, Mus musculus
LILEPNNRDIALLK

SEQ ID NO: 1601 - protein, 12 aa, Mus musculus
LKEAQLPVIENK

SEQ ID NO: 1602 - protein, 10 aa, Mus musculus
LSRPATITDK

SEQ ID NO: 1603 - protein, 26 aa, Mus musculus
  MOD_RES (26)..(26): Arg-carbamidomethyl oxidation
LSRPATITDKVIPACLPSPNYMVADR

SEQ ID NO: 1604 - protein, 27 aa, Mus musculus
  MOD_RES (26)..(26): Arg-carbamidomethyl oxidation
  MOD_RES (27)..(27): Methionin oxidation
LSRPATITDKVIPACLPSPNYMVADRM

SEQ ID NO: 1605 - protein, 9 aa, Mus musculus
MRDVILFEK

SEQ ID NO: 1606 - protein, 10 aa, Mus musculus
  MOD_RES (10)..(10): Methionin oxidation
MRDVILFEKM

SEQ ID NO: 1607 - protein, 8 aa, Mus musculus
  MOD_RES (8)..(8): Arg-carbamidomethyl oxidation
NLEENYCR

SEQ ID NO: 1608 - protein, 26 aa, Mus musculus
  MOD_RES (26)..(26): Arg-carbamidomethyl oxidation-carbamidomethyl oxidation
NLEENYCRNPDGETAPWCYTTDSQLR

SEQ ID NO: 1609 - protein, 18 aa, Mus musculus
  MOD_RES (18)..(18): Arg-carbamidomethyl oxidation
NPDGDKGPWCYTTDPSVR

SEQ ID NO: 1610 - protein, 17 aa, Mus musculus
  MOD_RES (17)..(17): Arg-carbamidomethyl oxidation
NPDGDVNGPWCYTTNPR

SEQ ID NO: 1611 - protein, 18 aa, Mus musculus
  MOD_RES (18)..(18): Lys-carbamidomethyl oxidation
NPDGDVNGPWCYTTNPRK

SEQ ID NO: 1612 - protein, 17 aa, Mus musculus
  MOD_RES (17)..(17): Lys-carbamidomethyl oxidation
NPDGEPRPWCFTTDPTK

SEQ ID NO: 1613 - protein, 18 aa, Mus musculus
  MOD_RES (18)..(18): Arg-carbamidomethyl oxidation
NPDGEPRPWCFTTDPTKR

SEQ ID NO: 1614 - protein, 19 aa, Mus musculus
  MOD_RES (19)..(19): Arg-carbamidomethyl oxidation
NPDNDEQGPWCYTTDPDKR

SEQ ID NO: 1615 - protein, 21 aa, Mus musculus
  MOD_RES (21)..(21): Arg-carbamidomethyl oxidation-carbamidomethyl oxidation
NYCRNPDGDVNGPWCYTTNPR

SEQ ID NO: 1616 - protein, 13 aa, Mus musculus
  MOD_RES (13)..(13): Lys-carbamidomethyl oxidation
QLAAGGVSDCLAK

SEQ ID NO: 1617 - protein, 23 aa, Mus musculus
  MOD_RES (23)..(23): Arg-carbamidomethyl oxidation-carbamidomethyl oxidation-carbamidomethyl oxidation
QLAAGGVSDCLAKCEGETDFVCR

SEQ ID NO: 1618 - protein, 8 aa, Mus musculus
  MOD_RES (8)..(8): Lys-carbamidomethyl oxidation
RVYLSECK

SEQ ID NO: 1619 - protein, 19 aa, Mus musculus
  MOD_RES (19)..(19): Lys-carbamidomethyl oxidation
SFQYHSKEQQCVIMAENSK

SEQ ID NO: 1620 - protein, 20 aa, Mus musculus
  MOD_RES (20)..(20): Arg-carbamidomethyl oxidation
TAVTAAGTPCQGWAAQEPHR

SEQ ID NO: 1621 - protein, 14 aa, Mus musculus
  MOD_RES (14)..(14): Methionin oxidation
TGIGNGYRGTMSRM

SEQ ID NO: 1622 - protein, 19 aa, Mus musculus
  MOD_RES (19)..(19): Arg-carbamidomethyl oxidation
TICYITGWGETQGTFGAGR

SEQ ID NO: 1623 - protein, 16 aa, Mus musculus
  MOD_RES (16)..(16): Arg-carbamidomethyl oxidation-carbamidomethyl oxidation
TPENFPCKNLEENYCR

SEQ ID NO: 1624 - protein, 16 aa, Mus musculus
  MOD_RES (16)..(16): Arg-carbamidomethyl oxidation
TPENFPDAGLEMNYCR

SEQ ID NO: 1625 - protein, 17 aa, Mus musculus
  MOD_RES (17)..(17): Methionin oxidation-carbamidomethyl oxidation
TPENFPDAGLEMNYCRM

SEQ ID NO: 1626 - protein, 11 aa, Mus musculus
  MOD_RES (11)..(11): Arg-carbamidomethyl oxidation
VCNRVEYLNNR

SEQ ID NO: 1627 - protein, 11 aa, Mus musculus
VILGAHEEYIR

SEQ ID NO: 1628 - protein, 22 aa, Mus musculus
VILGAHEEYIRGSDVQEISVAK

SEQ ID NO: 1629 - protein, 16 aa, Mus musculus
  MOD_RES (16)..(16): Arg-carbamidomethyl oxidation
VIPACLPSPNYMVADR

SEQ ID NO: 1630 - protein, 17 aa, Mus musculus
  MOD_RES (16)..(16): Arg-carbamidomethyl oxidation
  MOD_RES (17)..(17): Methionin oxidation
VIPACLPSPNYMVADRM

SEQ ID NO: 1631 - protein, 10 aa, Mus musculus
VSRFVDWIER

SEQ ID NO: 1632 - protein, 8 aa, Mus musculus
  MOD_RES (8)..(8): Arg-carbamidomethyl oxidation
WEYCDIPR

SEQ ID NO: 1633 - protein, 8 aa, Mus musculus
  MOD_RES (8)..(8): Arg-carbamidomethyl oxidation
WEYCNLKR

SEQ ID NO: 1634 - protein, 27 aa, Mus musculus
  MOD_RES (27)..(27): Arg-carbamidomethyl oxidation
WGATFPHVPNYSPSTHPNEGLEENYCR

SEQ ID NO: 1635 - protein, 11 aa, Mus musculus
WSEQTPHRHNR

SEQ ID NO: 1636 - protein, 25 aa, Mus musculus
  MOD_RES (24)..(24): Lys-carbamidomethyl oxidation-carbamidomethyl oxidation-carbamidomethyl oxidation
  MOD_RES (25)..(25): Methionin oxidation-carbamidomethyl oxidation
YDYCNIPECEEECMYCSGEKYEGKM

SEQ ID NO: 1637 - protein, 10 aa, Artificial Sequence
  Description of Artificial Sequence: PLMS plasmin peptide 1
  MOD_RES (10)..(10): Arg-carbamidomethyl oxidation-carbamidomethyl oxidation
CEGETDFVCR

SEQ ID NO: 1638 - protein, 11 aa, Artificial Sequence
  Description of Artificial Sequence: PLMS plasmin peptide 2
  MOD_RES (11)..(11): Arg-carbamidomethyl oxidation
CQSWAAMFPHR

SEQ ID NO: 1639 - protein, 12 aa, Artificial Sequence
  Description of Artificial Sequence: PLMS plasmin peptide 3
  MOD_RES (11)..(11): Arg-carbamidomethyl oxidation
  MOD_RES (12)..(12): Methionin oxidation
CQSWAAMFPHRM

SEQ ID NO: 1640 - protein, 16 aa, Artificial Sequence
  Description of Artificial Sequence: PLMS plasmin peptide 4
  MOD_RES (16)..(16): Lys-carbamidomethyl oxidation-carbamidomethyl oxidation
CTTPPPPPSPTYQCLK

SEQ ID NO: 1641 - protein, 13 aa, Artificial Sequence
  Description of Artificial Sequence: PLMS plasmin peptide 5
  MOD_RES (12)..(12): Lys-carbamidomethyl oxidation
  MOD_RES (13)..(13): Methionin oxidation
EQQCVIMAENSKM

SEQ ID NO: 1642 - protein, 26 aa, Artificial Sequence
  Description of Artificial Sequence: PLMS plasmin peptide 6
  MOD_RES (26)..(26): Lys-carbamidomethyl oxidation-carbamidomethyl oxidation
FTGQHFCGGTLIAPEWVLTAAHCLEK

SEQ ID NO: 1643 - protein, 11 aa, Artificial Sequence
  Description of Artificial Sequence: PLMS plasmin peptide 7
  MOD_RES (11)..(11): Methionin oxidation
FVDWIEREMRM

SEQ ID NO: 1644 - protein, 15 aa, Artificial Sequence
  Description of Artificial Sequence: PLMS plasmin peptide 8
GENYRGTVSVTVSGK

SEQ ID NO: 1645 - protein, 22 aa, Artificial Sequence
  Description of Artificial Sequence: PLMS plasmin peptide 9
  MOD_RES (22)..(22): Arg-carbamidomethyl oxidation
GKTAVTAAGTPCQGWAAQEPHR

SEQ ID NO: 1646 - protein, 11 aa, Artificial Sequence
  Description of Artificial Sequence: PLMS plasmin peptide 10
HSIFTPQTNPR

SEQ ID NO: 1647 - protein, 12 aa, Artificial Sequence
  Description of Artificial Sequence: PLMS plasmin peptide 11
  MOD_RES (12)..(12): Arg-carbamidomethyl oxidation
KCQSWAAMFPHR

SEQ ID NO: 1648 - protein, 13 aa, Artificial Sequence
  Description of Artificial Sequence: PLMS plasmin peptide 12
  MOD_RES (12)..(12): Arg-carbamidomethyl oxidation
  MOD_RES (13)..(13): Methionin oxidation
KCQSWAAMFPHRM

SEQ ID NO: 1649 - protein, 14 aa, Artificial Sequence
  Description of Artificial Sequence: PLMS plasmin peptide 13
LILEPNNRDIALLK

SEQ ID NO: 1650 - protein, 12 aa, Artificial Sequence
  Description of Artificial Sequence: PLMS plasmin peptide 14
LKEAQLPVIENK

SEQ ID NO: 1651 - protein, 10 aa, Artificial Sequence
  Description of Artificial Sequence: PLMS plasmin peptide 15
LSRPATITDK

SEQ ID NO: 1652 - protein, 27 aa, Artificial Sequence
  Description of Artificial Sequence: PLMS plasmin peptide 16
  MOD_RES (27)..(27): Lys-carbamidomethyl oxidation-carbamidomethyl oxidation-carbamidomethyl oxidation
LYDYCDIPLCASASSFECGKPQVEPKK

SEQ ID NO: 1653 - protein, 9 aa, Artificial Sequence
  Description of Artificial Sequence: PLMS plasmin peptide 17
MRDVILFEK

SEQ ID NO: 1654 - protein, 10 aa, Artificial Sequence
  Description of Artificial Sequence: PLMS plasmin peptide 18
  MOD_RES (10)..(10): Methionin oxidation
MRDVILFEKM

SEQ ID NO: 1655 - protein, 8 aa, Artificial Sequence
  Description of Artificial Sequence: PLMS plasmin peptide 19
  MOD_RES (8)..(8): Arg-carbamidomethyl oxidation
NLEENYCR

SEQ ID NO: 1656 - protein, 18 aa, Artificial Sequence
  Description of Artificial Sequence: PLMS plasmin peptide 20
  MOD_RES (18)..(18): Arg-carbamidomethyl oxidation
NPDGDKGPWCYTTDPSVR

SEQ ID NO: 1657 - protein, 17 aa, Artificial Sequence
  Description of Artificial Sequence: PLMS plasmin peptide 21
  MOD_RES (17)..(17): Arg-carbamidomethyl oxidation
NPDGDVNGPWCYTTNPR

SEQ ID NO: 1658 - protein, 18 aa, Artificial Sequence
  Description of Artificial Sequence: PLMS plasmin peptide 22
  MOD_RES (18)..(18): Arg-carbamidomethyl oxidation
NPDGETAPWCYTTDSQLR

SEQ ID NO: 1659 - protein, 19 aa, Artificial Sequence
  Description of Artificial Sequence: PLMS plasmin peptide 23
  MOD_RES (19)..(19): Arg-carbamidomethyl oxidation
NPDNDEQGPWCYTTDPDKR

SEQ ID NO: 1660 - protein, 21 aa, Artificial Sequence
  Description of Artificial Sequence: PLMS plasmin peptide 24
  MOD_RES (21)..(21): Arg-carbamidomethyl oxidation-carbamidomethyl oxidation
NYCRNPDGDVNGPWCYTTNPR

SEQ ID NO: 1661 - protein, 23 aa, Artificial Sequence
  Description of Artificial Sequence: PLMS plasmin peptide 25
  MOD_RES (23)..(23): Arg-carbamidomethyl oxidation-carbamidomethyl oxidation-carbamidomethyl oxidation
QLAAGGVSDCLAKCEGETDFVCR

SEQ ID NO: 1662 - protein, 20 aa, Artificial Sequence
  Description of Artificial Sequence: PLMS plasmin peptide 26
  MOD_RES (20)..(20): Arg-carbamidomethyl oxidation
TAVTAAGTPCQGWAAQEPHR

SEQ ID NO: 1663 - protein, 19 aa, Artificial Sequence
  Description of Artificial Sequence: PLMS plasmin peptide 27
  MOD_RES (19)..(19): Arg-carbamidomethyl oxidation
TICYITGWGETQGTFGAGR

SEQ ID NO: 1664 - protein, 16 aa, Artificial Sequence
  Description of Artificial Sequence: PLMS plasmin peptide 28
  MOD_RES (16)..(16): Arg-carbamidomethyl oxidation
TPENFPDAGLEMNYCR

SEQ ID NO: 1665 - protein, 17 aa, Artificial Sequence
  Description of Artificial Sequence: PLMS plasmin peptide 29
  MOD_RES (17)..(17): Methionin oxidation-carbamidomethyl oxidation
TPENFPDAGLEMNYCRM

SEQ ID NO: 1666 - protein, 11 aa, Artificial Sequence
  Description of Artificial Sequence: PLMS plasmin peptide 30
  MOD_RES (11)..(11): Arg-carbamidomethyl oxidation
VCNRVEYLNNR

SEQ ID NO: 1667 - protein, 11 aa, Artificial Sequence
  Description of Artificial Sequence: PLMS plasmin peptide 31
VILGAHEEYIR

SEQ ID NO: 1668 - protein, 22 aa, Artificial Sequence
  Description of Artificial Sequence: PLMS plasmin peptide 32
VILGAHEEYIRGLDVQEISVAK

SEQ ID NO: 1669 - protein, 16 aa, Artificial Sequence
  Description of Artificial Sequence: PLMS plasmin peptide 33
  MOD_RES (16)..(16): Arg-carbamidomethyl oxidation
VIPACLPSPNYMVADR

SEQ ID NO: 1670 - protein, 17 aa, Artificial Sequence
  Description of Artificial Sequence: PLMS plasmin peptide 34
  MOD_RES (16)..(16): Arg-carbamidomethyl oxidation
  MOD_RES (17)..(17): Methionin oxidation
VIPACLPSPNYMVADRM

SEQ ID NO: 1671 - protein, 10 aa, Artificial Sequence
  Description of Artificial Sequence: PLMS plasmin peptide 35
VSRFVDWIER

SEQ ID NO: 1672 - protein, 8 aa, Artificial Sequence
  Description of Artificial Sequence: PLMS plasmin peptide 36
  MOD_RES (8)..(8): Arg-carbamidomethyl oxidation
WEYCDIPR

SEQ ID NO: 1673 - protein, 8 aa, Artificial Sequence
  Description of Artificial Sequence: PLMS plasmin peptide 37
  MOD_RES (8)..(8): Arg-carbamidomethyl oxidation
WEYCNLKR

SEQ ID NO: 1674 - protein, 11 aa, Artificial Sequence
  Description of Artificial Sequence: PLMS plasmin peptide 38
WSEQTPHRHNR

SEQ ID NO: 1675 - protein, 24 aa, Artificial Sequence
  Description of Artificial Sequence: Pregnancy zone protein peptide 1
  MOD_RES (24)..(24): Lys-carbamidomethyl oxidation
AAPLSLCALTAVDQSVLLLKPEAK

SEQ ID NO: 1676 - protein, 23 aa, Artificial Sequence
  Description of Artificial Sequence: Pregnancy zone protein peptide 2
AESPVFVQTDKPIYKPGQIVKFR

SEQ ID NO: 1677 - protein, 11 aa, Artificial Sequence
  Description of Artificial Sequence: Pregnancy zone protein peptide 3
AINYLISGYQR

SEQ ID NO: 1678 - protein, 13 aa, Artificial Sequence
  Description of Artificial Sequence: Pregnancy zone protein peptide 4
ALLAYAFALAGNK

SEQ ID NO: 1679 - protein, 15 aa, Artificial Sequence
  Description of Artificial Sequence: Pregnancy zone protein peptide 5
ALLAYAFALAGNKAK

SEQ ID NO: 1680 - protein, 24 aa, Artificial Sequence
  Description of Artificial Sequence: Pregnancy zone protein peptide 6
  MOD_RES (23)..(24): Methionin oxidation
AMGVPMMGLDYSDEINQVVEVRMM

SEQ ID NO: 1681 - protein, 24 aa, Artificial Sequence
  Description of Artificial Sequence: Pregnancy zone protein peptide 7
  MOD_RES (24)..(24): Lys-carbamidomethyl oxidation
EEGTGIELTGIGSCEIANALSKLK

SEQ ID NO: 1682 - protein, 24 aa, Artificial Sequence
  Description of Artificial Sequence: Pregnancy zone protein peptide 8
HSLGDNDAHSIFQSVGINIFTNSK

SEQ ID NO: 1683 - protein, 29 aa, Artificial Sequence
  Description of Artificial Sequence: Pregnancy zone protein peptide 9
HSLGDNDAHSIFQSVGINIFTNSKIHKPR

SEQ ID NO: 1684 - protein, 13 aa, Artificial Sequence
  Description of Artificial Sequence: Pregnancy zone protein peptide 10
LSPQSIYNLLPGK

SEQ ID NO: 1685 - protein, 13 aa, Artificial Sequence
  Description of Artificial Sequence: Pregnancy zone protein peptide 11
SKAINYLISGYQR

SEQ ID NO: 1686 - protein, 11 aa, Artificial Sequence
  Description of Artificial Sequence: Pregnancy zone protein peptide 12
SVIVEPEGIEK

SEQ ID NO: 1687 - protein, 10 aa, Artificial Sequence
  Description of Artificial Sequence: Pregnancy zone protein peptide 13
VKALSFYQPR

SEQ ID NO: 1688 - protein, 21 aa, Artificial Sequence
  Description of Artificial Sequence: Pregnancy zone protein peptide 14
VNTNYRPGLPFSGQVLLVDEK

SEQ ID NO: 1689 - protein, 19 aa, Artificial Sequence
  Description of Artificial Sequence: Properdin (AA 5 - 441) peptide 1
  MOD_RES (19)..(19): Lys-carbamidomethyl oxidation-carbamidomethyl oxidation-carbamidomethyl oxidation
CGGHCPGEAQQSQACDTQK

SEQ ID NO: 1690 - protein, 27 aa, Artificial Sequence
  Description of Artificial Sequence: Properdin (AA 5 - 441) peptide 2
  MOD_RES (27)..(27): Arg-carbamidomethyl oxidation-carbamidomethyl oxidation-carbamidomethyl oxidation-carbamidomethyl oxidation
DIRVEDCCLNAAYAFQEHDGGLCQACR

SEQ ID NO: 1691 - protein, 11 aa, Artificial Sequence
  Description of Artificial Sequence: Properdin (AA 5 - 441) peptide 3
  MOD_RES (11)..(11): Lys-carbamidomethyl oxidation-carbamidomethyl oxidation
HCYNIHNCIMK

SEQ ID NO: 1692 - protein, 12 aa, Artificial Sequence
  Description of Artificial Sequence: Properdin (AA 5 - 441) peptide 4
  MOD_RES (11)..(11): Lys-carbamidomethyl oxidation-carbamidomethyl oxidation
  MOD_RES (12)..(12): Methionin oxidation
HCYNIHNCIMKM

SEQ ID NO: 1693 - protein, 12 aa, Artificial Sequence
  Description of Artificial Sequence: Properdin (AA 5 - 441) peptide 5
  MOD_RES (12)..(12): Arg-carbamidomethyl oxidation
HGGPFCAGDATR

SEQ ID NO: 1694 - protein, 19 aa, Artificial Sequence
  Description of Artificial Sequence: Properdin (AA 5 - 441) peptide 6
  MOD_RES (18)..(18): Lys-carbamidomethyl oxidation
  MOD_RES (19)..(19): Methionin oxidation-carbamidomethyl oxidation
HGGPFCAGDATRNQMCNKM

SEQ ID NO: 1695 - protein, 16 aa, Artificial Sequence
  Description of Artificial Sequence: Properdin (AA 5 - 441) peptide 7
  MOD_RES (16)..(16): Lys-carbamidomethyl oxidation-carbamidomethyl oxidation
LQDIRHCYNIHNCIMK

SEQ ID NO: 1696 - protein, 17 aa, Artificial Sequence
  Description of Artificial Sequence: Properdin (AA 5 - 441) peptide 8
  MOD_RES (16)..(16): Lys-carbamidomethyl oxidation-carbamidomethyl oxidation
  MOD_RES (17)..(17): Methionin oxidation
LQDIRHCYNIHNCIMKM

SEQ ID NO: 1697 - protein, 16 aa, Artificial Sequence
  Description of Artificial Sequence: Properdin (AA 5 - 441) peptide 9
  MOD_RES (16)..(16): Arg-carbamidomethyl oxidation
LRMSINCEGTPGQQSR

SEQ ID NO: 1698 - protein, 17 aa, Artificial Sequence
  Description of Artificial Sequence: Properdin (AA 5 - 441) peptide 10
  MOD_RES (17)..(17): Methionin oxidation-carbamidomethyl oxidation
LRMSINCEGTPGQQSRM

SEQ ID NO: 1699 - protein, 14 aa, Artificial Sequence
  Description of Artificial Sequence: Properdin (AA 5 - 441) peptide 11
  MOD_RES (14)..(14): Arg-carbamidomethyl oxidation
MSINCEGTPGQQSR

SEQ ID NO: 1700 - protein, 15 aa, Artificial Sequence
  Description of Artificial Sequence: Properdin (AA 5 - 441) peptide 12
  MOD_RES (15)..(15): Methionin oxidation-carbamidomethyl oxidation
MSINCEGTPGQQSRM

SEQ ID NO: 1701 - protein, 10 aa, Artificial Sequence
  Description of Artificial Sequence: Properdin (AA 5 - 441) peptide 13
  MOD_RES (10)..(10): Lys-carbamidomethyl oxidation
QRLCTPLLPK

SEQ ID NO: 1702 - protein, 10 aa, Artificial Sequence
  Description of Artificial Sequence: Properdin (AA 5 - 441) peptide 14
  MOD_RES (10)..(10): Lys-carbamidomethyl oxidation
QRVCDNPAPK

SEQ ID NO: 1703 - protein, 24 aa, Artificial Sequence
  Description of Artificial Sequence: Properdin (AA 5 - 441) peptide 15
  MOD_RES (24)..(24): Lys-carbamidomethyl oxidation-carbamidomethyl oxidation
SCSAPAPSHQPPGKPCSGPAYEHK

SEQ ID NO: 1704 - protein, 26 aa, Artificial Sequence
  Description of Artificial Sequence: Properdin (AA 5 - 441) peptide 16
  MOD_RES (26)..(26): Lys-carbamidomethyl oxidation-carbamidomethyl oxidation
SRSCSAPAPSHQPPGKPCSGPAYEHK

SEQ ID NO: 1705 - protein, 21 aa, Artificial Sequence
  Description of Artificial Sequence: Put. beta-actin (aa 27-375) peptide 1
DLYANTVLSGGTTMYPGIADR

SEQ ID NO: 1706 - protein, 22 aa, Artificial Sequence
  Description of Artificial Sequence: Put. beta-actin (aa 27-375) peptide 2
  MOD_RES (22)..(22): Methionin oxidation
DLYANTVLSGGTTMYPGIADRM

SEQ ID NO: 1707 - protein, 11 aa, Artificial Sequence
  Description of Artificial Sequence: Put. beta-actin (aa 27-375) peptide 3
DSYVGDEAQSK

SEQ ID NO: 1708 - protein, 12 aa, Artificial Sequence
  Description of Artificial Sequence: Put. beta-actin (aa 27-375) peptide 4
DSYVGDEAQSKR

SEQ ID NO: 1709 - protein, 10 aa, Artificial Sequence
  Description of Artificial Sequence: Put. beta-actin (aa 27-375) peptide 5
GYSFTTTAER

SEQ ID NO: 1710 - protein, 14 aa, Artificial Sequence
  Description of Artificial Sequence: Put. beta-actin (aa 27-375) peptide 6
GYSFTTTAEREIVR

SEQ ID NO: 1711 - protein, 13 aa, Artificial Sequence
  Description of Artificial Sequence: Put. beta-actin (aa 27-375) peptide 7
  MOD_RES (12)..(13): Methionin oxidation
HQGVMVGMGQKMM

SEQ ID NO: 1712 - protein, 11 aa, Artificial Sequence
  Description of Artificial Sequence: Put. beta-actin (aa 27-375) peptide 8
IWHHTFYNELR

SEQ ID NO: 1713 - protein, 23 aa, Artificial Sequence
  Description of Artificial Sequence: Put. beta-actin (aa 27-375) peptide 9
  MOD_RES (23)..(23): Methionin oxidation
KDLYANTVLSGGTTMYPGIADRM

SEQ ID NO: 1714 - protein, 24 aa, Artificial Sequence
  Description of Artificial Sequence: Put. beta-actin (aa 27-375) peptide 10
  MOD_RES (23)..(23): Lys-carbamidomethyl oxidation
  MOD_RES (24)..(24): Methionin oxidation
LCYVALDFEQEMATAASSSSLEKM

SEQ ID NO: 1715 - protein, 14 aa, Artificial Sequence
  Description of Artificial Sequence: Put. beta-actin (aa 27-375) peptide 11
LDLAGRDLTDYLMK

SEQ ID NO: 1716 - protein, 15 aa, Artificial Sequence
  Description of Artificial Sequence: Put. beta-actin (aa 27-375) peptide 12
  MOD_RES (15)..(15): Methionin oxidation
LDLAGRDLTDYLMKM

SEQ ID NO: 1717 - protein, 13 aa, Artificial Sequence
  Description of Artificial Sequence: Put. beta-actin (aa 27-375) peptide 13
QEYDESGPSIVHR

SEQ ID NO: 1718 - protein, 14 aa, Artificial Sequence
  Description of Artificial Sequence: Put. beta-actin (aa 27-375) peptide 14
QEYDESGPSIVHRK

SEQ ID NO: 1719 - protein, 16 aa, Artificial Sequence
  Description of Artificial Sequence: Put. beta-actin (aa 27-375) peptide 15
SYELPDGQVITIGNER

SEQ ID NO: 1720 - protein, 18 aa, Artificial Sequence
  Description of Artificial Sequence: Put. beta-actin (aa 27-375) peptide 16
VAPEEHPVLLTEAPLNPK

SEQ ID NO: 1721 - protein, 24 aa, Artificial Sequence
  Description of Artificial Sequence: Pzp protein peptide 1
  MOD_RES (24)..(24): Lys-carbamidomethyl oxidation
AAPLSLCALTAVDQSVLLLKPEAK

SEQ ID NO: 1722 - protein, 21 aa, Artificial Sequence
  Description of Artificial Sequence: Pzp protein peptide 2
AESPVFVQTDKPIYKPGQIVK

SEQ ID NO: 1723 - protein, 23 aa, Artificial Sequence
  Description of Artificial Sequence: Pzp protein peptide 3
AESPVFVQTDKPIYKPGQIVKFR

SEQ ID NO: 1724 - protein, 13 aa, Artificial Sequence
  Description of Artificial Sequence: Pzp protein peptide 4
AFAQAQSHIFIEK

SEQ ID NO: 1725 - protein, 11 aa, Artificial Sequence
  Description of Artificial Sequence: Pzp protein peptide 5
AINYLISGYQR

SEQ ID NO: 1726 - protein, 13 aa, Artificial Sequence
  Description of Artificial Sequence: Pzp protein peptide 6
ALLAYAFALAGNK

SEQ ID NO: 1727 - protein, 27 aa, Artificial Sequence
  Description of Artificial Sequence: Pzp protein
  MOD_RES (27)..(27): Methionin oxidation
APSAEVEMTAYVLLAYLTSESSRPTRM

SEQ ID NO: 1728 - protein, 15 aa, Artificial Sequence
  Description of Artificial Sequence: Pzp protein peptide 8
  MOD_RES (15)..(15): Methionin oxidation-carbamidomethyl oxidation
ATVLNYMSHCIQIRM

SEQ ID NO: 1729 - protein, 19 aa, Artificial Sequence
  Description of Artificial Sequence: Pzp protein peptide 9
DAVKEEDSLHWQRPGDVQK

SEQ ID NO: 1730 - protein, 9 aa, Artificial Sequence
  Description of Artificial Sequence: Pzp protein peptide 10
DLTFYYLIK

SEQ ID NO: 1731 - protein, 24 aa, Artificial Sequence
  Description of Artificial Sequence: Pzp protein peptide 11
  MOD_RES (24)..(24): Lys-carbamidomethyl oxidation
EEGTGIELTGIGSCEIANALSKLK

SEQ ID NO: 1732 - protein, 17 aa, Artificial Sequence
  Description of Artificial Sequence: Pzp protein peptide 12
  MOD_RES (17)..(17): Lys-carbamidomethyl oxidation
ENGCFQQSGYLLNNAMK

SEQ ID NO: 1733 - protein, 18 aa, Artificial Sequence
  Description of Artificial Sequence: Pzp protein peptide 13
  MOD_RES (17)..(17): Lys-carbamidomethyl oxidation
  MOD_RES (18)..(18): Methionin oxidation
ENGCFQQSGYLLNNAMKM

SEQ ID NO: 1734 - protein, 14 aa, Artificial Sequence
  Description of Artificial Sequence: Pzp protein peptide 14
  MOD_RES (14)..(14): Lys-carbamidomethyl oxidation
GSGSGCVYLQTSLK

SEQ ID NO: 1735 - protein, 19 aa, Artificial Sequence
  Description of Artificial Sequence: Pzp protein peptide 15
GSIFNLGSHVLSLEQGNMK

SEQ ID NO: 1736 - protein, 20 aa, Artificial Sequence
  Description of Artificial Sequence: Pzp protein peptide 16
  MOD_RES (20)..(20): Methionin oxidation
GSIFNLGSHVLSLEQGNMKM

SEQ ID NO: 1737 - protein, 24 aa, Artificial Sequence
  Description of Artificial Sequence: Pzp protein peptide 17
HSLGDNDAHSIFQSVGINIFTNSK

SEQ ID NO: 1738 - protein, 15 aa, Artificial Sequence
  Description of Artificial Sequence: Pzp protein peptide 18
  MOD_RES (15)..(15): Methionin oxidation
IHYLLNEDIMKNEKM

SEQ ID NO: 1739 - protein, 9 aa, Artificial Sequence
  Description of Artificial Sequence: Pzp protein peptide 19
KIEHSFEVK

SEQ ID NO: 1740 - protein, 10 aa, Artificial Sequence
  Description of Artificial Sequence: Pzp protein peptide 20
KLQDQPNIQR

SEQ ID NO: 1741 - protein, 11 aa, Artificial Sequence
  Description of Artificial Sequence: Pzp protein peptide 21
LPDLPGNYVTK

SEQ ID NO: 1742 - protein, 13 aa, Artificial Sequence
  Description of Artificial Sequence: Pzp protein peptide 22
LSPQSIYNLLPGK

SEQ ID NO: 1743 - protein, 15 aa, Artificial Sequence
  Description of Artificial Sequence: Pzp protein peptide 23
LTEVPALVHKDTVVK

SEQ ID NO: 1744 - protein, 12 aa, Artificial Sequence
  Description of Artificial Sequence: Pzp protein peptide 24
NEKDLTFYYLIK

SEQ ID NO: 1745 - protein, 13 aa, Artificial Sequence
  Description of Artificial Sequence: Pzp protein peptide 25
SKAINYLISGYQR

SEQ ID NO: 1746 - protein, 17 aa, Artificial Sequence
  Description of Artificial Sequence: Pzp protein peptide 26
SQKEVLVTIESSGTFSK

SEQ ID NO: 1747 - protein, 14 aa, Artificial Sequence
  Description of Artificial Sequence: Pzp protein peptide 27
TEVNTNHVLIYIEK

SEQ ID NO: 1748 - protein, 14 aa, Artificial Sequence
  Description of Artificial Sequence: Pzp protein peptide 28
  MOD_RES (14)..(14): Methionin oxidation
THITNAFNWLSMKM

SEQ ID NO: 1749 - protein, 13 aa, Artificial Sequence
  Description of Artificial Sequence: Pzp protein peptide 29
TVQGAFFGVPVYK

SEQ ID NO: 1750 - protein, 10 aa, Artificial Sequence
  Description of Artificial Sequence: Pzp protein peptide 30
VKALSFYQPR

SEQ ID NO: 1751 - protein, 21 aa, Artificial Sequence
  Description of Artificial Sequence: Pzp protein peptide 31
VNTNYRPGLPFSGQVLLVDEK

SEQ ID NO: 1752 - protein, 10 aa, Artificial Sequence
  Description of Artificial Sequence: Pzp protein peptide 32
YNILPVADGK

SEQ ID NO: 1753 - protein, 10 aa, Artificial Sequence
  Description of Artificial Sequence: Pzp protein Retinol binding protein 4 peptide 1
DPNGLSPETR

SEQ ID NO: 1754 - protein, 11 aa, Artificial Sequence
  Description of Artificial Sequence: Pzp protein Retinol binding protein 4 peptide 2
DPNGLSPETRR

SEQ ID NO: 1755 - protein, 10 aa, Artificial Sequence
  Description of Artificial Sequence: Pzp protein Retinol binding protein 4 peptide 3
FSGLWYAIAK

SEQ ID NO: 1756 - protein, 11 aa, Artificial Sequence
  Description of Artificial Sequence: Pzp protein Retinol binding protein 4 peptide 4
FSGLWYAIAKK

SEQ ID NO: 1757 - protein, 26 aa, Artificial Sequence
  Description of Artificial Sequence: Pzp protein Retinol binding protein 4 peptide 5
  MOD_RES (25)..(25): Lys-carbamidomethyl oxidation
  MOD_RES (26)..(26): Methionin oxidation
LLSNWEVCADMVGTFTDTEDPAKFKM

SEQ ID NO: 1758 - protein, 18 aa, Artificial Sequence
  Description of Artificial Sequence: Pzp protein Retinol binding protein 4 peptide 6
  MOD_RES (18)..(18): Arg-carbamidomethyl oxidation
LQNLDGTCADSYSFVFSR

SEQ ID NO: 1759 - protein, 28 aa, Artificial Sequence
  Description of Artificial Sequence: Pzp protein Retinol binding protein 4 peptide 7
  MOD_RES (28)..(28): Arg-carbamidomethyl oxidation
LQNLDGTCADSYSFVFSRDPNGLSPETR

SEQ ID NO: 1760 - protein, 12 aa, Artificial Sequence
  Description of Artificial Sequence: Pzp protein Retinol binding protein 4 peptide 8
MKYWGVASFLQR

SEQ ID NO: 1761 - protein, 13 aa, Artificial Sequence
  Description of Artificial Sequence: Pzp protein Retinol binding protein 4 peptide 9
  MOD_RES (13)..(13): Methionin oxidation
MKYWGVASFLQRM

SEQ ID NO: 1762 - protein, 8 aa, Artificial Sequence
  Description of Artificial Sequence: Pzp protein Retinol binding protein 4 peptide 10
  MOD_RES (8)..(8): Arg-carbamidomethyl oxidation
QEELCLER

SEQ ID NO: 1763 - protein, 10 aa, Artificial Sequence
  Description of Artificial Sequence: Pzp protein Retinol binding protein 4 peptide 11
  MOD_RES (10)..(10): Arg-carbamidomethyl oxidation
QRQEELCLER

SEQ ID NO: 1764 - protein, 17 aa, Artificial Sequence
  Description of Artificial Sequence: Pzp protein Retinol binding protein 4 peptide 12
  MOD_RES (17)..(17): Arg-carbamidomethyl oxidation
QYRWIEHNGYCQSRPSR

SEQ ID NO: 1765 - protein, 14 aa, Artificial Sequence
  Description of Artificial Sequence: Pzp protein Retinol binding protein 4 peptide 13
  MOD_RES (14)..(14): Arg-carbamidomethyl oxidation
WIEHNGYCQSRPSR

SEQ ID NO: 1766 - protein, 10 aa, Artificial Sequence
  Description of Artificial Sequence: Pzp protein Retinol binding protein 4 peptide 14
YWGVASFLQR

SEQ ID NO: 1767 - protein, 30 aa, Artificial Sequence
  Description of Artificial Sequence: Serine (or cysteine) proteinase inhibitor, clade A, member 1a peptide 1
AVLTMDETGTEAAAATVLLAVPYSMPPIVR

SEQ ID NO: 1768 - protein, 31 aa, Artificial Sequence
  Description of Artificial Sequence: Serine (or cysteine) proteinase inhibitor, clade A, member 1a peptide 2
  MOD_RES (31)..(31): Methionin oxidation
AVLTMDETGTEAAAATVLLAVPYSMPPIVRM

SEQ ID NO: 1769 - protein, 32 aa, Artificial Sequence
  Description of Artificial Sequence: Serine (or cysteine) proteinase inhibitor, clade A, member 1a peptide 3
  MOD_RES (31)..(32): Methionin oxidation
AVLTMDETGTEAAAATVLLAVPYSMPPIVRMM

SEQ ID NO: 1770 - protein, 22 aa, Artificial Sequence
  Description of Artificial Sequence: Serine (or cysteine) proteinase inhibitor, clade A, member 1a peptide 4
DQSPASHEIATNLGDFAISLYR

SEQ ID NO: 1771 - protein, 22 aa, Artificial Sequence
  Description of Artificial Sequence: Serine (or cysteine) proteinase inhibitor, clade A, member 1a peptide 5
FDHPFLFIIFEEHTQSPLFVGK

SEQ ID NO: 1772 - protein, 25 aa, Artificial Sequence
  Description of Artificial Sequence: Serine (or cysteine) proteinase inhibitor, clade A, member 1a peptide 6
FLEEAKNHYQAEVFSVNFAESEEAK

SEQ ID NO: 1773 - protein, 19 aa, Artificial Sequence
  Description of Artificial Sequence: Serine (or cysteine) proteinase inhibitor, clade A, member 1a peptide 7
IFNNGADLSGITEENAPLK

SEQ ID NO: 1774 - protein, 26 aa, Artificial Sequence
  Description of Artificial Sequence: Serine (or cysteine) proteinase inhibitor, clade A, member 1a peptide 8
IFNNGADLSGITEENAPLKLSQAVHK

SEQ ID NO: 1775 - protein, 17 aa, Artificial Sequence
  Description of Artificial Sequence: Serine (or cysteine) proteinase inhibitor, clade A, member 1a peptide 9
KLDQDTVFALANYILFK

SEQ ID NO: 1776 - protein, 22 aa, Artificial Sequence
  Description of Artificial Sequence: Serine (or cysteine) proteinase inhibitor, clade A, member 1a peptide 10
KPFDPENTEEAEFHVDESTTVK

SEQ ID NO: 1777 - protein, 18 aa, Artificial Sequence
  Description of Artificial Sequence: Serine (or cysteine) proteinase inhibitor, clade A, member 1a peptide 11
LAQIHFPRLSISGEYNLK

SEQ ID NO: 1778 - protein, 16 aa, Artificial Sequence
  Description of Artificial Sequence: Serine (or cysteine) proteinase inhibitor, clade A, member 1a peptide 12
LDQDTVFALANYILFK

SEQ ID NO: 1779 - protein, 10 aa, Artificial Sequence
  Description of Artificial Sequence: Serine (or cysteine) proteinase inhibitor, clade A, member 1a peptide 13
LSISGEYNLK

SEQ ID NO: 1780 - protein, 15 aa, Artificial Sequence
  Description of Artificial Sequence: Serine (or cysteine) proteinase inhibitor, clade A, member 1a peptide 14
MQHLEQTLSKELISK

SEQ ID NO: 1781 - protein, 19 aa, Artificial Sequence
  Description of Artificial Sequence: Serine (or cysteine) proteinase inhibitor, clade A, member 1a peptide 15
NHYQAEVFSVNFAESEEAK

SEQ ID NO: 1782 - protein, 20 aa, Artificial Sequence
  Description of Artificial Sequence: Serine (or cysteine) proteinase inhibitor, clade A, member 1a peptide 16
NHYQAEVFSVNFAESEEAKK

SEQ ID NO: 1783 - protein, 9 aa, Artificial Sequence
  Description of Artificial Sequence: Serine (or cysteine) proteinase inhibitor, clade A, member 1a peptide 17
RLAQIHFPR

SEQ ID NO: 1784 - protein, 31 aa, Artificial Sequence; identical to SEQ ID NO: 195
  Description of Artificial Sequence: Serine (or cysteine) proteinase inhibitor, clade A, member 1a peptide 18

SEQ ID NO: 1785 - protein, 35 aa, Artificial Sequence
  Description of Artificial Sequence: Serine (or cysteine) proteinase inhibitor, clade A, member 1a peptide 19
SFQHLLQTLNRPDSELQLSTGNGLFVNNDLKLVEK

SEQ ID NO: 1786 - protein, 11 aa, Artificial Sequence
  Description of Artificial Sequence: Serine (or cysteine) proteinase inhibitor, clade A, member 1a peptide 20
  MOD_RES (11)..(11): Methionin oxidation
TLMSPLGITRM

SEQ ID NO: 1787 - protein, 13 aa, Artificial Sequence
  Description of Artificial Sequence: Serine (or cysteine) proteinase inhibitor, clade A, member 1a peptide 21
VINDFVEKGTQGK

SEQ ID NO: 1788 - protein, 24 aa, Artificial Sequence
  Description of Artificial Sequence: Serine (or cysteine) proteinase inhibitor, clade A, member 1a peptide 22
WKKPFDPENTEEAEFHVDESTTVK

SEQ ID NO: 1789 - protein, 22 aa, Artificial Sequence
  Description of Artificial Sequence: Serine (or cysteine) proteinase inhibitor, clade A, member 1a peptide 1
DQSPASHEIATNLGDFAISLYR

SEQ ID NO: 1790 - protein, 22 aa, Artificial Sequence
  Description of Artificial Sequence: Serine (or cysteine) proteinase inhibitor, clade A, member 1a peptide 2
FDHPFLFIIFEEHTQSPIFVGK

SEQ ID NO: 1791 - protein, 19 aa, Artificial Sequence
  Description of Artificial Sequence: Serine (or cysteine) proteinase inhibitor, clade A, member 1a peptide 3
IFNNGADLSGITEENAPLK

SEQ ID NO: 1792 - protein, 26 aa, Artificial Sequence
  Description of Artificial Sequence: Serine (or cysteine) proteinase inhibitor, clade A, member 1a peptide 4
IFNNGADLSGITEENAPLKLSQAVHK

SEQ ID NO: 1793 - protein, 17 aa, Artificial Sequence
  Description of Artificial Sequence: Serine (or cysteine) proteinase inhibitor, clade A, member 1a peptide 5
KLDQDTVFALANYILFK

SEQ ID NO: 1794 - protein, 22 aa, Artificial Sequence
  Description of Artificial Sequence: Serine (or cysteine) proteinase inhibitor, clade A, member 1a peptide 6
KPFDPENTEEAEFHVDESTTVK

SEQ ID NO: 1795 - protein, 16 aa, Artificial Sequence
  Description of Artificial Sequence: Serine (or cysteine) proteinase inhibitor, clade A, member 1a peptide 7
LDQDTVFALANYILFK

SEQ ID NO: 1796 - protein, 10 aa, Artificial Sequence
  Description of Artificial Sequence: Serine (or cysteine) proteinase inhibitor, clade A, member 1a peptide 8
LSISGEYNLK

SEQ ID NO: 1797 - protein, 40 aa, Artificial Sequence
  Description of Artificial Sequence: Serine (or cysteine) proteinase inhibitor, clade A, member 1a peptide 9
  MOD_RES (38)..(40): Methionin oxidation
LSQAVHKAVLTIDETGTEAAAVTVLQMVPMSMPPILRMMM

SEQ ID NO: 1798 - protein, 10 aa, Artificial Sequence
  Description of Artificial Sequence: Serine (or cysteine) proteinase inhibitor, clade A, member 1a peptide 10
MQHLEQTLSK

SEQ ID NO: 1799 - protein, 19 aa, Artificial Sequence
  Description of Artificial Sequence: Serine (or cysteine) proteinase inhibitor, clade A, member 1a peptide 11
NHYQAEVFSVNFAESEEAK

SEQ ID NO: 1800 - protein, 20 aa, Artificial Sequence
  Description of Artificial Sequence: Serine (or cysteine) proteinase inhibitor, clade A, member 1a peptide 12
NHYQAEVFSVNFAESEEAKK

SEQ ID NO: 1801 - protein, 9 aa, Artificial Sequence
  Description of Artificial Sequence: Serine (or cysteine) proteinase inhibitor, clade A, member 1a peptide 13
RLAQIHFPR

SEQ ID NO: 1802 - protein, 10 aa, Artificial Sequence
  Description of Artificial Sequence: Serine (or cysteine) proteinase inhibitor, clade A, member 1a peptide 14
TLMSPLGITR

SEQ ID NO: 1803 - protein, 11 aa, Artificial Sequence
  Description of Artificial Sequence: Serine (or cysteine) proteinase inhibitor, clade A, member 1a peptide 15
  MOD_RES (11)..(11): Methionin oxidation
TLMSPLGITRM

SEQ ID NO: 1804 - protein, 13 aa, Artificial Sequence
  Description of Artificial Sequence: Serine (or cysteine) proteinase inhibitor, clade A, member 1a peptide 16
VINDFVEKGTQGK

SEQ ID NO: 1805 - protein, 24 aa, Artificial Sequence
  Description of Artificial Sequence: Serine (or cysteine) proteinase inhibitor, clade A, member 1a peptide 17
WKKPFDPENTEEAEFHVDESTTVK

SEQ ID NO: 1806 - protein, 19 aa, Artificial Sequence
  Description of Artificial Sequence: Serine (or cysteine) proteinase inhibitor, clade A, member 1d peptide 1
DQSPASHEIATNLGDFALR

SEQ ID NO: 1807 - protein, 11 aa, Artificial Sequence
  Description of Artificial Sequence: Serine (or cysteine) proteinase inhibitor, clade A, member 1d peptide 2
ELISQFLLNRR

SEQ ID NO: 1808 - protein, 22 aa, Artificial Sequence
  Description of Artificial Sequence: Serine (or cysteine) proteinase inhibitor, clade A, member 1d peptide 3
FDHPFLFIIFEEHTQSPIFVGK

SEQ ID NO: 1809 - protein, 25 aa, Artificial Sequence
  Description of Artificial Sequence: Serine (or cysteine) proteinase inhibitor, clade A, member 1d peptide 4
FLEEAKNHYQAEVFSVNFAESEEAK

SEQ ID NO: 1810 - protein, 19 aa, Artificial Sequence
  Description of Artificial Sequence: Serine (or cysteine) proteinase inhibitor, clade A, member 1d peptide 5
IFNNGADLSGITEENAPLK

SEQ ID NO: 1811 - protein, 22 aa, Artificial Sequence
  Description of Artificial Sequence: Serine (or cysteine) proteinase inhibitor, clade A, member 1d peptide 6
IFNNGADLSGITEENAPLKLSK

SEQ ID NO: 1812 - protein, 17 aa, Artificial Sequence
  Description of Artificial Sequence: Serine (or cysteine) proteinase inhibitor, clade A, member 1d peptide 7
KLDQDTVFALANYILFK

SEQ ID NO: 1813 - protein, 9 aa, Artificial Sequence
  Description of Artificial Sequence: Serine (or cysteine) proteinase inhibitor, clade A, member 1d peptide 8
KVINDFVEK

SEQ ID NO: 1814 - protein, 16 aa, Artificial Sequence
  Description of Artificial Sequence: Serine (or cysteine) proteinase inhibitor, clade A, member 1d peptide 9
LDQDTVFALANYILFK

SEQ ID NO: 1815 - protein, 10 aa, Artificial Sequence
  Description of Artificial Sequence: Serine (or cysteine) proteinase inhibitor, clade A, member 1d peptide 10
LSISGNYNLK

SEQ ID NO: 1816 - protein, 20 aa, Artificial Sequence
  Description of Artificial Sequence: Serine (or cysteine) proteinase inhibitor, clade A, member 1d peptide 11
MQHLEQTLNKELISQFLLNR

SEQ ID NO: 1817 - protein, 19 aa, Artificial Sequence
  Description of Artificial Sequence: Serine (or cysteine) proteinase inhibitor, clade A, member 1d peptide 12
NHYQAEVFSVNFAESEEAK

SEQ ID NO: 1818 - protein, 20 aa, Artificial Sequence
  Description of Artificial Sequence: Serine (or cysteine) proteinase inhibitor, clade A, member 1d peptide 13
NHYQAEVFSVNFAESEEAKK

SEQ ID NO: 1819 - protein, 22 aa, Artificial Sequence
  Description of Artificial Sequence: Serine (or cysteine) proteinase inhibitor, clade A, member 1d peptide 14
QPFDPENTEEAEFHVDESTTVK

SEQ ID NO: 1820 - protein, 10 aa, Artificial Sequence
  Description of Artificial Sequence: Serine (or cysteine) proteinase inhibitor, clade A, member 1d peptide 15
RSDAQIHIPR

SEQ ID NO: 1821 - protein, 9 aa, Artificial Sequence
  Description of Artificial Sequence: Serine (or cysteine) proteinase inhibitor, clade A, member 1d peptide 16
SDAQIHIPR

SEQ ID NO: 1822 - protein, 10 aa, Artificial Sequence
  Description of Artificial Sequence: Serine (or cysteine) proteinase inhibitor, clade A, member 1d peptide 17
TLMSPLGITR

SEQ ID NO: 1823 - protein, 11 aa, Artificial Sequence
  Description of Artificial Sequence: Serine (or cysteine) proteinase inhibitor, clade A, member 1d peptide 18
  MOD_RES (11)..(11): Methionin oxidation
TLMSPLGITRM

SEQ ID NO: 1824 - protein, 30 aa, Artificial Sequence
  Description of Artificial Sequence: Serine (or cysteine) proteinase inhibitor, clade A, member 1d peptide 19
  MOD_RES (30)..(30): Methionin oxidation
TLMSPLGITRIFNNGADLSGITEENAPLKM

SEQ ID NO: 1825 - protein, 13 aa, Artificial Sequence
  Description of Artificial Sequence: Serine (or cysteine) proteinase inhibitor, clade A, member 1d peptide 20
VINDFVEKGTQGK

SEQ ID NO: 1826 - protein, 24 aa, Artificial Sequence
  Description of Artificial Sequence: Serine (or cysteine) proteinase inhibitor, clade A, member 1d peptide 21
WKQPFDPENTEEAEFHVDESTTVK

SEQ ID NO: 1827 - protein, 22 aa, Artificial Sequence
  Description of Artificial Sequence: Serine (or cysteine) proteinase inhibitor, clade A, member 1e peptide 1
DQSPASHEIATNLGDFAISLYR

SEQ ID NO: 1828 - protein, 25 aa, Artificial Sequence
  Description of Artificial Sequence: Serine (or cysteine) proteinase inhibitor, clade A, member 1e peptide 2
FLEEAKNHYQAEVFSVNFAESEEAK

SEQ ID NO: 1829 - protein, 19 aa, Artificial Sequence
  Description of Artificial Sequence: Serine (or cysteine) proteinase inhibitor, clade A, member 1e peptide 3
IFNSGADLSGITEENAPLK

SEQ ID NO: 1830 - protein, 26 aa, Artificial Sequence
  Description of Artificial Sequence: Serine (or cysteine) proteinase inhibitor, clade A, member 1e peptide 4
IFNSGADLSGITEENAPLKLSQAVHK

SEQ ID NO: 1831 - protein, 17 aa, Artificial Sequence
  Description of Artificial Sequence: Serine (or cysteine) proteinase inhibitor, clade A, member 1e peptide 5
KLEQDTVFVLANYILFK

SEQ ID NO: 1832 - protein, 9 aa, Artificial Sequence
  Description of Artificial Sequence: Serine (or cysteine) proteinase inhibitor, clade A, member 1e peptide 6
KPFDPENTK

SEQ ID NO: 1833 - protein, 9 aa, Artificial Sequence
  Description of Artificial Sequence: Serine (or cysteine) proteinase inhibitor, clade A, member 1e peptide 7
KVINDFVEK

SEQ ID NO: 1834 - protein, 28 aa, Artificial Sequence
  Description of Artificial Sequence: Serine (or cysteine) proteinase inhibitor, clade A, member 1e peptide 8
LAQIHIPRLSISGNYNLETLMSPLGITR

SEQ ID NO: 1835 - protein, 29 aa, Artificial Sequence
  Description of Artificial Sequence: Serine (or cysteine) proteinase inhibitor, clade A, member 1e peptide 9
  MOD_RES (29)..(29): Methionin oxidation
LAQIHIPRLSISGNYNLETLMSPLGITRM

SEQ ID NO: 1836 - protein, 16 aa, Artificial Sequence
  Description of Artificial Sequence: Serine (or cysteine) proteinase inhibitor, clade A, member 1e peptide 10
LEQDTVFVLANYILFK

SEQ ID NO: 1837 - protein, 20 aa, Artificial Sequence
  Description of Artificial Sequence: Serine (or cysteine) proteinase inhibitor, clade A, member 1e peptide 11
LSISGNYNLETLMSPLGITR

SEQ ID NO: 1838 - protein, 21 aa, Artificial Sequence
  Description of Artificial Sequence: Serine (or cysteine) proteinase inhibitor, clade A, member 1e peptide 12
  MOD_RES (21)..(21): Methionin oxidation
LSISGNYNLETLMSPLGITRM

SEQ ID NO: 1839 - protein, 15 aa, Artificial Sequence
  Description of Artificial Sequence: Serine (or cysteine) proteinase inhibitor, clade A, member 1e peptide 13
MQHLEQTLNKELISK

SEQ ID NO: 1840 - protein, 16 aa, Artificial Sequence
  Description of Artificial Sequence: Serine (or cysteine) proteinase inhibitor, clade A, member 1e peptide 14
  MOD_RES (16)..(16): Methionin oxidation
MQHLEQTLNKELISKM

SEQ ID NO: 1841 - protein, 20 aa, Artificial Sequence
  Description of Artificial Sequence: Serine (or cysteine) proteinase inhibitor, clade A, member 1e peptide 15
NHYQAEVFSVNFAESEEAKK

SEQ ID NO: 1842 - protein, 13 aa, Artificial Sequence
  Description of Artificial Sequence: Serine (or cysteine) proteinase inhibitor, clade A, member 1e peptide 16
QAEFHVDESTTVK

SEQ ID NO: 1843 - protein, 9 aa, Artificial Sequence
  Description of Artificial Sequence: Serine (or cysteine) proteinase inhibitor, clade A, member 1e peptide 17
RLAQIHIPR

SEQ ID NO: 1844 - protein, 13 aa, Artificial Sequence
  Description of Artificial Sequence: Serine (or cysteine) proteinase inhibitor, clade A, member 1e peptide 18
VINDFVEKGTQGK

SEQ ID NO: 1845 - protein, 11 aa, Artificial Sequence
  Description of Artificial Sequence: Serine (or cysteine) proteinase inhibitor, clade A, member 1e peptide 19
WKKPFDPENTK

SEQ ID NO: 1846 - protein, 19 aa, Artificial Sequence
  Description of Artificial Sequence: Serine (or cysteine) proteinase inhibitor, clade A, member 3K peptide 1
ALYQTEAFTADFQQPTEAK

SEQ ID NO: 1847 - protein, 23 aa, Artificial Sequence
  Description of Artificial Sequence: Serine (or cysteine) proteinase inhibitor, clade A, member 3K peptide 2
AVLDVAETGTEAAAATGVIGGIR

SEQ ID NO: 1848 - protein, 24 aa, Artificial Sequence
  Description of Artificial Sequence: Serine (or cysteine) proteinase inhibitor, clade A, member 3K peptide 3
AVLDVAETGTEAAAATGVIGGIRK

SEQ ID NO: 1849 - protein, 11 aa, Artificial Sequence
  Description of Artificial Sequence: Serine (or cysteine) proteinase inhibitor, clade A, member 3K peptide 4
DLQILAEFHEK

SEQ ID NO: 1850 - protein, 8 aa, Artificial Sequence
  Description of Artificial Sequence: Serine (or cysteine) proteinase inhibitor, clade A, member 3K peptide 5
FSIASNYR

SEQ ID NO: 1851 - protein, 15 aa, Artificial Sequence
  Description of Artificial Sequence: Serine (or cysteine) proteinase inhibitor, clade A, member 3K peptide 6
  MOD_RES (15)..(15): Lys-carbamidomethyl oxidation
HFRDEELSCSVLELK

SEQ ID NO: 1852 - protein, 19 aa, Artificial Sequence
  Description of Artificial Sequence: Serine (or cysteine) proteinase inhibitor, clade A, member 3K peptide 7
ISFDPQDTFESEFYLDEKR

SEQ ID NO: 1853 - protein, 15 aa, Artificial Sequence
  Description of Artificial Sequence: Serine (or cysteine) proteinase inhibitor, clade A, member 3K peptide 8
KTLFPSQIEELNLPK

SEQ ID NO: 1854 - protein, 29 aa, Artificial Sequence
  Description of Artificial Sequence: Serine (or cysteine) proteinase inhibitor, clade A, member 3K peptide 9
LALKNPDTNIVFSPLSISAALALVSLGAK

SEQ ID NO: 1855 - protein, 15 aa, Artificial Sequence
  Description of Artificial Sequence: Serine (or cysteine) proteinase inhibitor, clade A, member 3K peptide 10
  MOD_RES (15)..(15): Methionin oxidation
MQQVEASLQPETLRM

SEQ ID NO: 1856 - protein, 16 aa, Artificial Sequence
  Description of Artificial Sequence: Serine (or cysteine) proteinase inhibitor, clade A, member 3K peptide 11
  MOD_RES (16)..(16): Methionin oxidation
MQQVEASLQPETLRKM

SEQ ID NO: 1857 - protein, 14 aa, Artificial Sequence
  Description of Artificial Sequence: Serine (or cysteine) proteinase inhibitor, clade A, member 3K peptide 12
TLFPSQIEELNLPK

SEQ ID NO: 1858 - protein, 13 aa, Artificial Sequence
  Description of Artificial Sequence: Serine (or cysteine) proteinase inhibitor, clade A, member 3K peptide 13
  MOD_RES (13)..(13): Methionin oxidation
TLMVLVNYIYFKM

SEQ ID NO: 1859 - protein, 10 aa, Artificial Sequence
  Description of Artificial Sequence: Serine (or cysteine) proteinase inhibitor, clade C (antithrombin), member 1 peptide 1
ANRPFLVLIR

SEQ ID NO: 1860 - protein, 23 aa, Artificial Sequence
  Description of Artificial Sequence: Serine (or cysteine) proteinase inhibitor, clade C (antithrombin), member 1 peptide 2
  MOD_RES (23)..(23): Methionin oxidation
ANRPFLVLIREVALNTIIFMGRM

SEQ ID NO: 1861 - protein, 17 aa, Artificial Sequence
  Description of Artificial Sequence: Serine (or cysteine) proteinase inhibitor, clade C (antithrombin), member 1 peptide 3
ATEEDGSEQKVPEATNR

SEQ ID NO: 1862 - protein, 11 aa, Artificial Sequence
  Description of Artificial Sequence: Serine (or cysteine) proteinase inhibitor, clade C (antithrombin), member 1 peptide 4
  MOD_RES (11)..(11): Arg-carbamidomethyl oxidation
DIPVNPLCIYR

SEQ ID NO: 1863 - protein, 15 aa, Artificial Sequence
  Description of Artificial Sequence: Serine (or cysteine) proteinase inhibitor, clade C (antithrombin), member 1 peptide 5
  MOD_RES (15)..(15): Lys-carbamidomethyl oxidation
DIPVNPLCIYRSPGK

SEQ ID NO: 1864 - protein, 17 aa, Artificial Sequence
  Description of Artificial Sequence: Serine (or cysteine) proteinase inhibitor, clade C (antithrombin), member 1 peptide 6
ENPEQSRVTINNWVANK

SEQ ID NO: 1865 - protein, 17 aa, Artificial Sequence
  Description of Artificial Sequence: Serine (or cysteine) proteinase inhibitor, clade C (antithrombin), member 1 peptide 7
  MOD_RES (17)..(17): Methionin oxidation
EQLQDMGLIDLFSPEKM

SEQ ID NO: 1866 - protein, 12 aa, Artificial Sequence
  Description of Artificial Sequence: Serine (or cysteine) proteinase inhibitor, clade C (antithrombin), member 1 peptide 8
EVALNTIIFMGR

SEQ ID NO: 1867 - protein, 13 aa, Artificial Sequence
  Description of Artificial Sequence: Serine (or cysteine) proteinase inhibitor, clade C (antithrombin), member 1 peptide 9
  MOD_RES (13)..(13): Methionin oxidation
EVALNTIIFMGRM

SEQ ID NO: 1868 - protein, 13 aa, Artificial Sequence
  Description of Artificial Sequence: Serine (or cysteine) proteinase inhibitor, clade C (antithrombin), member 1 peptide 10
FATNFYQHLADSK

SEQ ID NO: 1869 - protein, 10 aa, Artificial Sequence
  Description of Artificial Sequence: Serine (or cysteine) proteinase inhibitor, clade C (antithrombin), member 1 peptide 11
FRTEDGFSLK

SEQ ID NO: 1870 - protein, 25 aa, Artificial Sequence
  Description of Artificial Sequence: Serine (or cysteine) proteinase inhibitor, clade C (antithrombin), member 1 peptide 12
IKDVIPQGAINELTALVLVNTIYFK

SEQ ID NO: 1871 - protein, 14 aa, Artificial Sequence
  Description of Artificial Sequence: Serine (or cysteine) proteinase inhibitor, clade C (antithrombin), member 1 peptide 13
LQPLDFKENPEQSR

SEQ ID NO: 1872 - protein, 22 aa, Artificial Sequence
  Description of Artificial Sequence: Serine (or cysteine) proteinase inhibitor, clade C (antithrombin), member 1 peptide 14
  MOD_RES (22)..(22): Methionin oxidation
NDNDNIFLSPLSISTAFAMTKM

SEQ ID NO: 1873 - protein, 14 aa, Artificial Sequence
  Description of Artificial Sequence: Serine (or cysteine) proteinase inhibitor, clade C (antithrombin), member 1 peptide 15
QLMEVFKFDTISEK

SEQ ID NO: 1874 - protein, 15 aa, Artificial Sequence
  Description of Artificial Sequence: Serine (or cysteine) proteinase inhibitor, clade C (antithrombin), member 1 peptide 16
  MOD_RES (15)..(15): Methionin oxidation
QLMEVFKFDTISEKM

SEQ ID NO: 1875 - protein, 9 aa, Artificial Sequence
  Description of Artificial Sequence: Serine (or cysteine) proteinase inhibitor, clade C (antithrombin), member 1 peptide 17
SKFSPENTR

SEQ ID NO: 1876 - protein, 10 aa, Artificial Sequence
  Description of Artificial Sequence: Serine (or cysteine) proteinase inhibitor, clade C (antithrombin), member 1 peptide 18
SLNPNRVTFK

SEQ ID NO: 1877 - protein, 22 aa, Artificial Sequence
  Description of Artificial Sequence: Serine (or cysteine) proteinase inhibitor, clade C (antithrombin), member 1 peptide 19
SQLPGIVAGGRDDLYVSDAFHK

SEQ ID NO: 1878 - protein, 14 aa, Artificial Sequence
  Description of Artificial Sequence: Serine (or cysteine) proteinase inhibitor, clade C (antithrombin), member 1 peptide 20
SSDLVSANRLFGDK

SEQ ID NO: 1879 - protein, 11 aa, Artificial Sequence
  Description of Artificial Sequence: Serine (or cysteine) proteinase inhibitor, clade C (antithrombin), member 1 peptide 21
TSDQIHFFFAK

SEQ ID NO: 1880 - protein, 28 aa, Artificial Sequence
  Description of Artificial Sequence: Serine (or cysteine) proteinase inhibitor, clade C (antithrombin), member 1 peptide 22
VAEGTQVLELPFKGDDITMVLILPKPEK

SEQ ID NO: 1881 - protein, 29 aa, Artificial Sequence
  Description of Artificial Sequence: Serine (or cysteine) proteinase inhibitor, clade C (antithrombin), member 1 peptide 23
  MOD_RES (29)..(29): Methionin oxidation
VAEGTQVLELPFKGDDITMVLILPKPEKM

SEQ ID NO: 1882 - protein, 18 aa, Artificial Sequence
  Description of Artificial Sequence: Serine (or cysteine) proteinase inhibitor, clade C (antithrombin), member 1 peptide 24
  MOD_RES (16)..(16): Lys-carbamidomethyl oxidation
  MOD_RES (17)..(18): Methionin oxidation
VDGQSCPVPMMYQEGKMM

SEQ ID NO: 1883 - protein, 17 aa, Artificial Sequence
  Description of Artificial Sequence: Serine (or cysteine) proteinase inhibitor, clade C (antithrombin), member 1 peptide 2
  MOD_RES (17)..(17): Methionin oxidation-carbamidomethyl oxidation
VDGQSCPVPMMYQEGKM

SEQ ID NO: 1884 - protein, 8 aa, Artificial Sequence
  Description of Artificial Sequence: Serine (or cysteine) proteinase inhibitor, clade F, member 2 peptide 1
DFFHLDER

SEQ ID NO: 1885 - protein, 16 aa, Artificial Sequence
  Description of Artificial Sequence: Serine (or cysteine) proteinase inhibitor, clade F, member 2 peptide 2
FDPSLTQKDFFHLDER

SEQ ID NO: 1886 - protein, 17 aa, Artificial Sequence
  Description of Artificial Sequence: Serine (or cysteine) proteinase inhibitor, clade F, member 2 peptide 3
  MOD_RES (17)..(17): Methionin oxidation
FTVSVDMMHAVSYPLRM

SEQ ID NO: 1887 - protein, 18 aa, Artificial Sequence
  Description of Artificial Sequence: Serine (or cysteine) proteinase inhibitor, clade F, member 2 peptide 4
  MOD_RES (17)..(18): Methionin oxidation
FTVSVDMMHAVSYPLRMM

SEQ ID NO: 1888 - protein, 14 aa, Artificial Sequence
  Description of Artificial Sequence: Serine (or cysteine) proteinase inhibitor, clade F, member 2 peptide 5
GFPIKDDFLEQSER

SEQ ID NO: 1889 - protein, 17 aa, Artificial Sequence
  Description of Artificial Sequence: Serine (or cysteine) proteinase inhibitor, clade F, member 2 peptide 6
  MOD_RES (17)..(17): Methionin oxidation
LAPRMEEDYPQFSSPKM

SEQ ID NO: 1890 - protein, 13 aa, Artificial Sequence
  Description of Artificial Sequence: Serine (or cysteine) proteinase inhibitor, clade F, member 2 peptide 7
LDNQDFGDHATLK

SEQ ID NO: 1891 - protein, 14 aa, Artificial Sequence
  Description of Artificial Sequence: Serine (or cysteine) proteinase inhibitor, clade F, member 2 peptide 8
LDNQDFGDHATLKR

SEQ ID NO: 1892 - protein, 8 aa, Artificial Sequence
  Description of Artificial Sequence: Serine (or cysteine) proteinase inhibitor, clade F, member 2 peptide 9
LFGAKPVK

SEQ ID NO: 1893 - protein, 14 aa, Artificial Sequence
  Description of Artificial Sequence: Serine (or cysteine) proteinase inhibitor, clade F, member 2 peptide 10
LIGQNDKADFHGGK

SEQ ID NO: 1894 - protein, 8 aa, Artificial Sequence
  Description of Artificial Sequence: Serine (or cysteine) proteinase inhibitor, clade F, member 2 peptide 11
LPLPALFK

SEQ ID NO: 1895 - protein, 17 aa, Artificial Sequence
  Description of Artificial Sequence: Serine (or cysteine) proteinase inhibitor, clade F, member 2 peptide 12
LTGKQEEDLANINQWVK

SEQ ID NO: 1896 - protein, 14 aa, Artificial Sequence
  Description of Artificial Sequence: Serine (or cysteine) proteinase inhibitor, clade F, member 2 peptide 13
NPNPSALPQLQEQR

SEQ ID NO: 1897 - protein, 20 aa, Artificial Sequence
  Description of Artificial Sequence: Serine (or cysteine) proteinase inhibitor, clade F, member 2 peptide 14
NPNPSALPQLQEQRDSPDNR

SEQ ID NO: 1898 - protein, 13 aa, Artificial Sequence
  Description of Artificial Sequence: Serine (or cysteine) proteinase inhibitor, clade F, member 2 peptide 15
QEEDLANINQWVK

SEQ ID NO: 1899 - protein, 10 aa, Artificial Sequence
  Description of Artificial Sequence: Serine (or cysteine) proteinase inhibitor, clade F, member 2 peptide 16
SVPTAEETRR

SEQ ID NO: 1900 - protein, 17 aa, Artificial Sequence
  Description of Artificial Sequence: Serine (or cysteine) proteinase inhibitor, clade F, member 2 peptide 17
WFLLEQPEIQVAHFPFK

SEQ ID NO: 1901 - protein, 30 aa, Artificial Sequence
  Description of Artificial Sequence: Serpina1a protein peptide 1
AVLTIDETGTEAAAVTVLLAVPYSMPPILR

SEQ ID NO: 1902 - protein, 31 aa, Artificial Sequence
  Description of Artificial Sequence: Serpina1a protein peptide 2
  MOD_RES (31)..(31): Methionin oxidation
AVLTIDETGTEAAAVTVLLAVPYSMPPILRM

SEQ ID NO: 1903 - protein, 22 aa, Artificial Sequence
  Description of Artificial Sequence: Serpina1a protein peptide 3
DQSPASHEIATNLGDFAISLYR

SEQ ID NO: 1904 - protein, 22 aa, Artificial Sequence
  Description of Artificial Sequence: Serpina1a protein peptide 4
FDHPFLFIIFEEHTQSPLFVGK

SEQ ID NO: 1905 - protein, 25 aa, Artificial Sequence
  Description of Artificial Sequence: Serpina1a protein peptide 5
FLEEAKNHYQAEVFSVNFAESEEAK

SEQ ID NO: 1906 - protein, 19 aa, Artificial Sequence
  Description of Artificial Sequence: Serpina1a protein peptide 6
IFNNGADLSGITEENAPLK

SEQ ID NO: 1907 - protein, 26 aa, Artificial Sequence
  Description of Artificial Sequence: Serpina1a protein peptide 7
IFNNGADLSGITEENAPLKLSQAVHK

SEQ ID NO: 1908 - protein, 17 aa, Artificial Sequence
  Description of Artificial Sequence: Serpina1a protein peptide 8
KLDQDTVFALANYILFK

SEQ ID NO: 1909 - protein, 22 aa, Artificial Sequence
  Description of Artificial Sequence: Serpina1a protein peptide 9
KPFDPENTEEAEFHVDESTTVK

SEQ ID NO: 1910 - protein, 9 aa, Artificial Sequence
  Description of Artificial Sequence: Serpina1a protein peptide 10
KVINDFVEK

SEQ ID NO: 1911 - protein, 16 aa, Artificial Sequence
  Description of Artificial Sequence: Serpina1a protein peptide 11
LDQDTVFALANYILFK

SEQ ID NO: 1912 - protein, 10 aa, Artificial Sequence
  Description of Artificial Sequence: Serpina1a protein peptide 12
LSISGEYNLK

SEQ ID NO: 1913 - protein, 10 aa, Artificial Sequence
  Description of Artificial Sequence: Serpina1a protein peptide 13
MQHLEQTLSK

SEQ ID NO: 1914 - protein, 11 aa, Artificial Sequence
  Description of Artificial Sequence: Serpina1a protein peptide 14
  MOD_RES (11)..(11): Methionin oxidation
MQHLEQTLSKM

SEQ ID NO: 1915 - protein, 19 aa, Artificial Sequence
  Description of Artificial Sequence: Serpina1a protein peptide 15
NHYQAEVFSVNFAESEEAK

SEQ ID NO: 1916 - protein, 20 aa, Artificial Sequence
  Description of Artificial Sequence: Serpina1a protein peptide 16
NHYQAEVFSVNFAESEEAKK

SEQ ID NO: 1917 - protein, 9 aa, Artificial Sequence
  Description of Artificial Sequence: Serpina1a protein peptide 17
RLAQIHFPR

SEQ ID NO: 1918 - protein, 31 aa, Artificial Sequence; identical to SEQ ID NO: 195
  Description of Artificial Sequence: Serpina1a protein peptide 18

SEQ ID NO: 1919 - protein, 35 aa, Artificial Sequence; identical to SEQ ID NO: 1785
  Description of Artificial Sequence: Serpina1a protein peptide 19

SEQ ID NO: 1920 - protein, 10 aa, Artificial Sequence
  Description of Artificial Sequence: Serpina1a protein peptide 20
TLMSPLGITR

SEQ ID NO: 1921 - protein, 11 aa, Artificial Sequence
  Description of Artificial Sequence: Serpina1a protein peptide 21
  MOD_RES (11)..(11): Methionin oxidation
TLMSPLGITRM

SEQ ID NO: 1922 - protein, 13 aa, Artificial Sequence
  Description of Artificial Sequence: Serpina1a protein peptide 22
VINDFVEKGTQGK

SEQ ID NO: 1923 - protein, 24 aa, Artificial Sequence
  Description of Artificial Sequence: Serpina1a protein peptide 23
WKKPFDPENTEEAEFHVDESTTVK

SEQ ID NO: 1924 - protein, 30 aa, Artificial Sequence; identical to SEQ ID NO: 1901
  Description of Artificial Sequence: Serpina1a protein peptide 1

SEQ ID NO: 1925 - protein, 31 aa, Artificial Sequence; identical to SEQ ID NO: 1902
  Description of Artificial Sequence: Serpina1a protein peptide 2
  MOD_RES (31)..(31): Methionin oxidation

SEQ ID NO: 1926 - protein, 22 aa, Artificial Sequence
  Description of Artificial Sequence: Serpina1a protein peptide 3
DQSPASHEIATNLGDFAISLYR

SEQ ID NO: 1927 - protein, 22 aa, Artificial Sequence
  Description of Artificial Sequence: Serpina1a protein peptide 4
FDHPFLFIIFEEHTQSPLFVGK

SEQ ID NO: 1928 - protein, 25 aa, Artificial Sequence
  Description of Artificial Sequence: Serpina1a protein peptide 5
FLEEAKNHYQAEVFSVNFAESEEAK

SEQ ID NO: 1929 - protein, 6 aa, Artificial Sequence
  Description of Artificial Sequence: Serpina1a protein peptide 6
FLLNRR

SEQ ID NO: 1930 - protein, 19 aa, Artificial Sequence
  Description of Artificial Sequence: Serpina1a protein peptide 7
IFNNGADLSGITEENAPLK

SEQ ID NO: 1931 - protein, 26 aa, Artificial Sequence
  Description of Artificial Sequence: Serpina1a protein peptide 8
IFNNGADLSGITEENAPLKLSQAVHK

SEQ ID NO: 1932 - protein, 17 aa, Artificial Sequence
  Description of Artificial Sequence: Serpina1a protein peptide 9
KLDQDTVFALANYILFK

SEQ ID NO: 1933 - protein, 22 aa, Artificial Sequence
  Description of Artificial Sequence: Serpina1a protein peptide 10
KPFDPENTEEAEFHVDESTTVK

SEQ ID NO: 1934 - protein, 9 aa, Artificial Sequence
  Description of Artificial Sequence: Serpina1a protein peptide 11
KVINDFVEK

SEQ ID NO: 1935 - protein, 8 aa, Artificial Sequence
  Description of Artificial Sequence: Serpina1a protein peptide 12
LAQIHFPR

SEQ ID NO: 1936 - protein, 16 aa, Artificial Sequence
  Description of Artificial Sequence: Serpina1a protein peptide 13
LDQDTVFALANYILFK

SEQ ID NO: 1937 - protein, 10 aa, Artificial Sequence
  Description of Artificial Sequence: Serpina1a protein peptide 14
LSISGEYNLK

SEQ ID NO: 1938 - protein, 11 aa, Artificial Sequence
  Description of Artificial Sequence: Serpina1a protein peptide 15
  MOD_RES (11)..(11): Methionin oxidation
MQHLEQTLSKM

SEQ ID NO: 1939 - protein, 19 aa, Artificial Sequence
  Description of Artificial Sequence: Serpina1a protein peptide 16
NHYQAEVFSVNFAESEEAK

SEQ ID NO: 1940 - protein, 20 aa, Artificial Sequence
  Description of Artificial Sequence: Serpina1a protein peptide 17
NHYQAEVFSVNFAESEEAKK

SEQ ID NO: 1941 - protein, 9 aa, Artificial Sequence
  Description of Artificial Sequence: Serpina1a protein peptide 18
RLAQIHFPR

SEQ ID NO: 1942 - protein, 31 aa, Artificial Sequence; identical to SEQ ID NO: 195
  Description of Artificial Sequence: Serpina1a protein peptide 19

SEQ ID NO: 1943 - protein, 10 aa, Artificial Sequence
  Description of Artificial Sequence: Serpina1a protein peptide 20
TLMSPLGITR

SEQ ID NO: 1944 - protein, 11 aa, Artificial Sequence
  Description of Artificial Sequence: Serpina1a protein peptide 21
  MOD_RES (11)..(11): Methionin oxidation
TLMSPLGITRM

SEQ ID NO: 1945 - protein, 29 aa, Artificial Sequence
  Description of Artificial Sequence: Serpina1a protein peptide 22
TLMSPLGITRIFNNGADLSGITEENAPLK

SEQ ID NO: 1946 - protein, 8 aa, Artificial Sequence
  Description of Artificial Sequence: Serpina1a protein peptide 23
VINDFVEK

SEQ ID NO: 1947 - protein, 13 aa, Artificial Sequence
  Description of Artificial Sequence: Serpina1a protein peptide 24
VINDFVEKGTQGK

SEQ ID NO: 1948 - protein, 24 aa, Artificial Sequence
  Description of Artificial Sequence: Serpina1a protein peptide 25
WKKPFDPENTEEAEFHVDESTTVK

SEQ ID NO: 1949 - protein, 20 aa, Artificial Sequence
  Description of Artificial Sequence: Serum amyloid P-component peptide 1
APPSIVLGQEQDNYGGGFQR

SEQ ID NO: 1950 - protein, 14 aa, Artificial Sequence
  Description of Artificial Sequence: Serum amyloid P-component peptide 2
EKVGEYSLYIGQSK

SEQ ID NO: 1951 - protein, 25 aa, Artificial Sequence
  Description of Artificial Sequence: Serum amyloid P-component peptide 3
EYTVKAPPSIVLGQEQDNYGGGFQR

SEQ ID NO: 1952 - protein, 10 aa, Artificial Sequence
  Description of Artificial Sequence: Serum amyloid P-component peptide 4
GRDNELLIYK

SEQ ID NO: 1953 - protein, 12 aa, Artificial Sequence
  Description of Artificial Sequence: Serum amyloid P-component peptide 5
SQSLFSYSVKGR

SEQ ID NO: 1954 - protein, 17 aa, Artificial Sequence
  Description of Artificial Sequence: Serum amyloid P-component peptide 6
TYSDLSRSQSLFSYSVK

SEQ ID NO: 1955 - protein, 14 aa, Artificial Sequence
  Description of Artificial Sequence: Serum amyloid P-component peptide 7
VFVFPRESETDHVK

SEQ ID NO: 1956 - protein, 12 aa, Artificial Sequence
  Description of Artificial Sequence: Serum amyloid P-component peptide 8
VGEYSLYIGQSK

SEQ ID NO: 1957 - protein, 16 aa, Artificial Sequence
  Description of Artificial Sequence: Serum amyloid P-component peptide 9
VGEYSLYIGQSKVTVR

SEQ ID NO: 1958 - protein, 15 aa, Artificial Sequence
  Description of Artificial Sequence: Transferrin peptide 1
  MOD_RES (15)..(15): Arg-carbamidomethyl oxidation
ADRDQYELLCLDNTR

SEQ ID NO: 1959 - protein, 23 aa, Artificial Sequence
  Description of Artificial Sequence: Transferrin peptide 2
  MOD_RES (23)..(23): Lys-carbamidomethyl oxidation-carbamidomethyl oxidation
AVLTSQETLFGGSDCTGNFCLFK

SEQ ID NO: 1960 - protein, 21 aa, Artificial Sequence
  Description of Artificial Sequence: Transferrin peptide 3
  MOD_RES (21)..(21): Lys-carbamidomethyl oxidation-carbamidomethyl oxidation
AVSSFFSGSCVPCADPVAFPK

SEQ ID NO: 1961 - protein, 17 aa, Artificial Sequence
  Description of Artificial Sequence: Transferrin peptide 4
  MOD_RES (17)..(17): Arg-carbamidomethyl oxidation
CAPNNKEEYNGYTGAFR

SEQ ID NO: 1962 - protein, 13 aa, Artificial Sequence
  Description of Artificial Sequence: Transferrin peptide 5
  MOD_RES (13)..(13): Lys-carbamidomethyl oxidation
CFVKLPEGTTPEK

SEQ ID NO: 1963 - protein, 13 aa, Artificial Sequence
  Description of Artificial Sequence: Transferrin peptide 6
  MOD_RES (13)..(13): Lys-carbamidomethyl oxidation
CLKDGGGDVAFVK

SEQ ID NO: 1964 - protein, 12 aa, Artificial Sequence
  Description of Artificial Sequence: Transferrin peptide 7
  MOD_RES (12)..(12): Lys-carbamidomethyl oxidation
CLVEKGDVAFVK

SEQ ID NO: 1965 - protein, 18 aa, Artificial Sequence
  Description of Artificial Sequence: Transferrin peptide 8
  MOD_RES (18)..(18): Arg-carbamidomethyl oxidation
DFASCHLAQAPNHVVVSR

SEQ ID NO: 1966 - protein, 19 aa, Artificial Sequence
  Description of Artificial Sequence: Transferrin peptide 9
  MOD_RES (19)..(19): Lys-carbamidomethyl oxidation
DFASCHLAQAPNHVVVSRK

SEQ ID NO: 1967 - protein, 11 aa, Artificial Sequence
  Description of Artificial Sequence: Transferrin peptide 10
DFQLFSSPLGK

SEQ ID NO: 1968 - protein, 10 aa, Artificial Sequence
  Description of Artificial Sequence: Transferrin peptide 11
DGGGDVAFVK

SEQ ID NO: 1969 - protein, 13 aa, Artificial Sequence
  Description of Artificial Sequence: Transferrin peptide 12
DLLFKDSAFGLLR

SEQ ID NO: 1970 - protein, 9 aa, Artificial Sequence
  Description of Artificial Sequence: Transferrin peptide 13
DLLFRDDTK

SEQ ID NO: 1971 - protein, 12 aa, Artificial Sequence
  Description of Artificial Sequence: Transferrin peptide 14
  MOD_RES (12)..(12): Arg-carbamidomethyl oxidation
DQYELLCLDNTR

SEQ ID NO: 1972 - protein, 8 aa, Artificial Sequence
  Description of Artificial Sequence: Transferrin peptide 15
DSAFGLLR

SEQ ID NO: 1973 - protein, 12 aa, Artificial Sequence
  Description of Artificial Sequence: Transferrin peptide 16
DSAFGLLRVPPR

SEQ ID NO: 1974 - protein, 15 aa, Artificial Sequence
  Description of Artificial Sequence: Transferrin peptide 17
  MOD_RES (15)..(15): Lys-carbamidomethyl oxidation
FDEFFSQGCAPGYEK

SEQ ID NO: 1975 - protein, 13 aa, Artificial Sequence
  Description of Artificial Sequence: Transferrin peptide 18
GTDFQLNQLEGKK

SEQ ID NO: 1976 - protein, 9 aa, Artificial Sequence
  Description of Artificial Sequence: Transferrin peptide 19
GYYAVAVVK

SEQ ID NO: 1977 - protein, 18 aa, Artificial Sequence
  Description of Artificial Sequence: Transferrin peptide 20
HQTVLDNTEGKNPAEWAK

SEQ ID NO: 1978 - protein, 9 aa, Artificial Sequence
  Description of Artificial Sequence: Transferrin peptide 21
IPSHAVVAR

SEQ ID NO: 1979 - protein, 22 aa, Artificial Sequence
  Description of Artificial Sequence: Transferrin peptide 22
  MOD_RES (22)..(22): Arg-carbamidomethyl oxidation
KPVKDFASCHLAQAPNHVVVSR

SEQ ID NO: 1980 - protein, 9 aa, Artificial Sequence
  Description of Artificial Sequence: Transferrin peptide 23
  MOD_RES (9)..(9): Arg-carbamidomethyl oxidation
KSCHTGLGR

SEQ ID NO: 1981 - protein, 9 aa, Artificial Sequence
  Description of Artificial Sequence: Transferrin peptide 24
  MOD_RES (9)..(9): Arg-carbamidomethyl oxidation
KSCHTGVDR

SEQ ID NO: 1982 - protein, 24 aa, Artificial Sequence
  Description of Artificial Sequence: Transferrin peptide 25
  MOD_RES (24)..(24): Lys-carbamidomethyl oxidation-carbamidomethyl oxidation-carbamidomethyl oxidation-carbamidomethyl oxidation
LCQLCPGCGCSSTQPFFGYVGAFK

SEQ ID NO: 1983 - protein, 10 aa, Artificial Sequence
  Description of Artificial Sequence: Transferrin peptide 26
  MOD_RES (10)..(10): His-carbamidomethyl oxidation
LLEACTFHKH

SEQ ID NO: 1984 - protein, 12 aa, Artificial Sequence
  Description of Artificial Sequence: Transferrin peptide 27
LYLGHNYVTAIR

SEQ ID NO: 1985 - protein, 16 aa, Artificial Sequence
  Description of Artificial Sequence: Transferrin peptide 28
  MOD_RES (16)..(16): Arg-carbamidomethyl oxidation
NLKQEDFELLCPDGTR

SEQ ID NO: 1986 - protein, 18 aa, Artificial Sequence
  Description of Artificial Sequence: Transferrin peptide 29
  MOD_RES (18)..(18): Lys-carbamidomethyl oxidation
NQQEGVCPEGSIDNSPVK

SEQ ID NO: 1987 - protein, 27 aa, Artificial Sequence
  Description of Artificial Sequence: Transferrin peptide 30
  MOD_RES (27)..(27): Arg-carbamidomethyl oxidation-carbamidomethyl oxidation
NQQEGVCPEGSIDNSPVKWCALSHLER

SEQ ID NO: 1988 - protein, 14 aa, Artificial Sequence
  Description of Artificial Sequence: Transferrin peptide 31
  MOD_RES (14)..(14): Lys-carbamidomethyl oxidation
SAGWVIPIGLLFCK

SEQ ID NO: 1989 - protein, 8 aa, Artificial Sequence
  Description of Artificial Sequence: Transferrin peptide 32
  MOD_RES (8)..(8): Arg-carbamidomethyl oxidation
SCHTGLGR

SEQ ID NO: 1990 - protein, 8 aa, Artificial Sequence
  Description of Artificial Sequence: Transferrin peptide 33
  MOD_RES (8)..(8): Arg-carbamidomethyl oxidation
SCHTGVDR

SEQ ID NO: 1991 - protein, 13 aa, Artificial Sequence
  Description of Artificial Sequence: Transferrin peptide 34
SKDFQLFSSPLGK

SEQ ID NO: 1992 - protein, 15 aa, Artificial Sequence
  Description of Artificial Sequence: Transferrin peptide 35
  MOD_RES (15)..(15): Methionin oxidation
TAGWNIPMGMLYNRM

SEQ ID NO: 1993 - protein, 16 aa, Artificial Sequence
  Description of Artificial Sequence: Transferrin peptide 36
  MOD_RES (15)..(16): Methionin oxidation
TAGWNIPMGMLYNRMM

SEQ ID NO: 1994 - protein, 8 aa, Artificial Sequence
  Description of Artificial Sequence: Transferrin peptide 37
  MOD_RES (8)..(8): Lys-carbamidomethyl oxidation
TSYPDCIK

SEQ ID NO: 1995 - protein, 9 aa, Artificial Sequence
  Description of Artificial Sequence: Transferrin peptide 38
TVLPPDGPR

SEQ ID NO: 1996 - protein, 8 aa, Artificial Sequence
  Description of Artificial Sequence: Transferrin peptide 39
VAQEHFGK

SEQ ID NO: 1997 - protein, 9 aa, Artificial Sequence
  Description of Artificial Sequence: Transferrin peptide 40
  MOD_RES (9)..(9): Methionin oxidation
VPPRMDYRM

SEQ ID NO: 1998 - protein, 9 aa, Artificial Sequence
  Description of Artificial Sequence: Transferrin peptide 41
  MOD_RES (9)..(9): Arg-carbamidomethyl oxidation
WCALSHLER

SEQ ID NO: 1999 - protein, 11 aa, Artificial Sequence
  Description of Artificial Sequence: Transferrin peptide 42
  MOD_RES (11)..(11): Lys-carbamidomethyl oxidation
WCAVSEHENTK

SEQ ID NO: 2000 - protein, 14 aa, Artificial Sequence
  Description of Artificial Sequence: Transferrin peptide 43
YLGAEYMQSVGNMR

SEQ ID NO: 2001 - protein, 15 aa, Artificial Sequence
  Description of Artificial Sequence: Transferrin peptide 44
  MOD_RES (15)..(15): Methionin oxidation
YLGAEYMQSVGNMRM

SEQ ID NO: 2002 - protein, 15 aa, Artificial Sequence
  Description of Artificial Sequence: Transferrin peptide 45
YLGAEYMQSVGNMRK

SEQ ID NO: 2003 - protein, 16 aa, Artificial Sequence
  Description of Artificial Sequence: Transferrin peptide 46
  MOD_RES (16)..(16): Methionin oxidation
YLGAEYMQSVGNMRKM

SEQ ID NO: 2004 - protein, 17 aa, Artificial Sequence
  Description of Artificial Sequence: Transferrin peptide 47
  MOD_RES (16)..(17): Methionin oxidation
YLGAEYMQSVGNMRKMM

SEQ ID NO: 2005 - protein, 13 aa, Artificial Sequence
  Description of Artificial Sequence: Transthyretin peptide 1
FVEGVYRVELDTK

SEQ ID NO: 2006 - protein, 13 aa, Artificial Sequence
  Description of Artificial Sequence: Transthyretin peptide 2
GSPAVDVAVKVFK

SEQ ID NO: 2007 - protein, 24 aa, Artificial Sequence
  Description of Artificial Sequence: Transthyretin peptide 3
HYTIAALLSPYSYSTTAVVSNPQN

SEQ ID NO: 2008 - protein, 14 aa, Artificial Sequence
  Description of Artificial Sequence: Transthyretin peptide 4
KTSEGSWEPFASGK

SEQ ID NO: 2009 - protein, 31 aa, Artificial Sequence
  Description of Artificial Sequence: Transthyretin peptide 5
  MOD_RES (30)..(30): Lys-carbamidomethyl oxidation-carbamidomethyl oxidation
  MOD_RES (31)..(31): Methionin oxidation
LFLLCLAGLVFVSEAGPAGAGESKCPLMVKM

SEQ ID NO: 2010 - protein, 15 aa, Artificial Sequence
  Description of Artificial Sequence: Transthyretin peptide 6
TAESGELHGLTTDEK

SEQ ID NO: 2011 - protein, 22 aa, Artificial Sequence
  Description of Artificial Sequence: Transthyretin peptide 7
TAESGELHGLTTDEKFVEGVYR

SEQ ID NO: 2012 - protein, 23 aa, Artificial Sequence
  Description of Artificial Sequence: Transthyretin peptide 8
TLGISPFHEFADVVFTANDSGHR

SEQ ID NO: 2013 - protein, 13 aa, Artificial Sequence
  Description of Artificial Sequence: Transthyretin peptide 9
TSEGSWEPFASGK

SEQ ID NO: 2014 - protein, 10 aa, Artificial Sequence
  Description of Artificial Sequence: Transthyretin peptide 10
VELDTKSYWK

SEQ ID NO: 2015 - protein, 16 aa, Artificial Sequence
  Description of Artificial Sequence: Transthyretin peptide 11
VLDAVRGSPAVDVAVK

SEQ ID NO: 2016 - protein, 21 aa, Artificial Sequence
  Description of Artificial Sequence: Vitamin D-binding protein peptide 1
  MOD_RES (20)..(20): Lys-carbamidomethyl oxidation-carbamidomethyl oxidation-carbamidomethyl oxidation
  MOD_RES (21)..(21): Methionin oxidation
CCESTSEDCMASELPEHTIKM

SEQ ID NO: 2017 - protein, 20 aa, Artificial Sequence
  Description of Artificial Sequence: Vitamin D-binding protein peptide 2
  MOD_RES (20)..(20): Arg-carbamidomethyl oxidation
DLCGQSTTQAMDQYTFELSR

SEQ ID NO: 2018 - protein, 21 aa, Artificial Sequence
  Description of Artificial Sequence: Vitamin D-binding protein peptide 3
  MOD_RES (20)..(20): Arg-carbamidomethyl oxidation
  MOD_RES (21)..(21): Methionin oxidation
DLCGQSTTQAMDQYTFELSRM

SEQ ID NO: 2019 - protein, 21 aa, Artificial Sequence
  Description of Artificial Sequence: Vitamin D-binding protein peptide 4
  MOD_RES (21)..(21): Arg-carbamidomethyl oxidation
DLCGQSTTQAMDQYTFELSRR

SEQ ID NO: 2020 - protein, 22 aa, Artificial Sequence
  Description of Artificial Sequence: Vitamin D-binding protein peptide 5
  MOD_RES (21)..(21): Arg-carbamidomethyl oxidation
  MOD_RES (22)..(22): Methionin oxidation
DLCGQSTTQAMDQYTFELSRRM

SEQ ID NO: 2021 - protein, 21 aa, Artificial Sequence
  Description of Artificial Sequence: Vitamin D-binding protein peptide 6
  MOD_RES (21)..(21): Arg-carbamidomethyl oxidation-carbamidomethyl oxidation-carbamidomethyl oxidation
ECCDTQDSVACFSTQSPLLKR

SEQ ID NO: 2022 - protein, 22 aa, Artificial Sequence
  Description of Artificial Sequence: Vitamin D-binding protein peptide 7
  MOD_RES (22)..(22): Arg-carbamidomethyl oxidation-carbamidomethyl oxidation-carbamidomethyl oxidation
EVVSLTEECCAEGADPTCYDTR

SEQ ID NO: 2023 - protein, 14 aa, Artificial Sequence
  Description of Artificial Sequence: Vitamin D-binding protein peptide 8
FSSSTFEQVNQLVK

SEQ ID NO: 2024 - protein, 27 aa, Artificial Sequence
  Description of Artificial Sequence: Vitamin D-binding protein peptide 9
GFADQFLYEYSSNYGQAPLPLLVAYTK

SEQ ID NO: 2025 - protein, 17 aa, Artificial Sequence
  Description of Artificial Sequence: Vitamin D-binding protein peptide 10
  MOD_RES (17)..(17): Lys-carbamidomethyl oxidation
GQEMCADYSENTFTEYK

SEQ ID NO: 2026 - protein, 19 aa, Artificial Sequence
  Description of Artificial Sequence: Vitamin D-binding protein peptide 11
  MOD_RES (19)..(19): Methionin oxidation-carbamidomethyl oxidation
GQEMCADYSENTFTEYKKM

SEQ ID NO: 2027 - protein, 11 aa, Artificial Sequence
  Description of Artificial Sequence: Vitamin D-binding protein peptide 12
HLSLLTTMSNR

SEQ ID NO: 2028 - protein, 12 aa, Artificial Sequence
  Description of Artificial Sequence: Vitamin D-binding protein peptide 13
  MOD_RES (12)..(12): Methionin oxidation
HLSLLTTMSNRM

SEQ ID NO: 2029 - protein, 15 aa, Artificial Sequence
  Description of Artificial Sequence: Vitamin D-binding protein peptide 14
KFSSSTFEQVNQLVK

SEQ ID NO: 2030 - protein, 31 aa, Artificial Sequence
  Description of Artificial Sequence: Vitamin D-binding protein peptide 15
  MOD_RES (30)..(30): Arg-carbamidomethyl oxidation
  MOD_RES (31)..(31): Methionin oxidation-carbamidomethyl oxidation
KLCMAALSHQPQEFPTYVEPTNDEICEAFRM

SEQ ID NO: 2031 - protein, 26 aa, Artificial Sequence
  Description of Artificial Sequence: Vitamin D-binding protein peptide 16
LAQKVPTANLENVLPLAEDFTEILSR

SEQ ID NO: 2032 - protein, 26 aa, Artificial Sequence
  Description of Artificial Sequence: Vitamin D-binding protein peptide 17
  MOD_RES (25)..(25): Arg-carbamidomethyl oxidation
  MOD_RES (26)..(26): Methionin oxidation
LPTGKDLCGQSTTQAMDQYTFELSRM

SEQ ID NO: 2033 - protein, 16 aa, Artificial Sequence
  Description of Artificial Sequence: Vitamin D-binding protein peptide 18
  MOD_RES (16)..(16): Methionin oxidation
LQMKHLSLLTTMSNRM

SEQ ID NO: 2034 - protein, 21 aa, Artificial Sequence
  Description of Artificial Sequence: Vitamin D-binding protein peptide 19
  MOD_RES (21)..(21): Lys-carbamidomethyl oxidation-carbamidomethyl oxidation-carbamidomethyl oxidation
NYLSMVGSCCTSANPTVCFVK

SEQ ID NO: 2035 - protein, 22 aa, Artificial Sequence
  Description of Artificial Sequence: Vitamin D-binding protein peptide 20
  MOD_RES (22)..(22): Methionin oxidation-carbamidomethyl oxidation-carbamidomethyl oxidation-carbamidomethyl oxidation
NYLSMVGSCCTSANPTVCFVKM

SEQ ID NO: 2036 - protein, 26 aa, Artificial Sequence
  Description of Artificial Sequence: Vitamin D-binding protein peptide  21
  MOD_RES (26)..(26): Methionin oxidation-carbamidomethyl oxidation
QLTSFIEKGQEMCADYSENTFTEYKM

SEQ ID NO: 2037 - protein, 11 aa, Artificial Sequence
  Description of Artificial Sequence: Vitamin D-binding protein peptide 22
RTQVPEVFLSK

SEQ ID NO: 2038 - protein, 20 aa, Artificial Sequence
  Description of Artificial Sequence: Vitamin D-binding protein peptide 23
  MOD_RES (20)..(20): Lys-carbamidomethyl oxidation-carbamidomethyl oxidation-carbamidomethyl oxidation
SCESDAPFPVHPGTPECCTK

SEQ ID NO: 2039 - protein, 25 aa, Artificial Sequence
  Description of Artificial Sequence: Vitamin D-binding protein peptide 24
  MOD_RES (25)..(25): Arg-carbamidomethyl oxidation-carbamidomethyl oxidation-carbamidomethyl oxidation
SCESDAPFPVHPGTPECCTKEGLER

SEQ ID NO: 2040 - protein, 9 aa, Artificial Sequence
  Description of Artificial Sequence: Vitamin D-binding protein peptide 25
SLSLILYSR

SEQ ID NO: 2041 - protein, 23 aa, Artificial Sequence
  Description of Artificial Sequence: Vitamin D-binding protein peptide 26
  MOD_RES (23)..(23): Lys-carbamidomethyl oxidation-carbamidomethyl oxidation-carbamidomethyl oxidation
TLRECCDTQDSVACFSTQSPLLK

SEQ ID NO: 2042 - protein, 10 aa, Artificial Sequence
  Description of Artificial Sequence: Vitamin D-binding protein peptide 27
TQVPEVFLSK

SEQ ID NO: 2043 - protein, 10 aa, Artificial Sequence
  Description of Artificial Sequence: Vitamin D-binding protein peptide 28
  MOD_RES (10)..(10): Lys-carbamidomethyl oxidation
VCSQYAAYGK

SEQ ID NO: 2044 - protein, 12 aa, Artificial Sequence
  Description of Artificial Sequence: Vitamin D-binding protein peptide 29
  MOD_RES (12)..(12): Lys-carbamidomethyl oxidation
VCSQYAAYGKEK

SEQ ID NO: 2045 - protein, 22 aa, Artificial Sequence
  Description of Artificial Sequence: Vitamin D-binding protein peptide 30
VPTANLENVLPLAEDFTEILSR

SEQ ID NO: 2046 - protein, 11 aa, Artificial Sequence
  Description of Artificial Sequence: Zinc-alpha 2- glycoprotein peptide 1
AREEIFLVTLK

SEQ ID NO: 2047 - protein, 13 aa, Artificial Sequence
  Description of Artificial Sequence: Zinc-alpha 2- glycoprotein peptide 2
  MOD_RES (13)..(13): Arg-carbamidomethyl oxidation
AYLEEECPEMLKR

SEQ ID NO: 2048 - protein, 14 aa, Artificial Sequence
  Description of Artificial Sequence: Zinc-alpha 2- glycoprotein peptide 3
  MOD_RES (13)..(13): Arg-carbamidomethyl oxidation
  MOD_RES (14)..(14): Methionin oxidation
AYLEEECPEMLKRM

SEQ ID NO: 2049 - protein, 10 aa, Artificial Sequence
  Description of Artificial Sequence: Zinc-alpha 2- glycoprotein peptide 4
  MOD_RES (10)..(10): Arg-carbamidomethyl oxidation
CLAYGFYPQR

SEQ ID NO: 2050 - protein, 21 aa, Artificial Sequence
  Description of Artificial Sequence: Zinc-alpha 2- glycoprotein peptide 5
FQATAFLNDQAFFHYNSNSGK

SEQ ID NO: 2051 - protein, 12 aa, Artificial Sequence
  Description of Artificial Sequence: Zinc-alpha 2- glycoprotein peptide 6
GFSQSLSVQWDR

SEQ ID NO: 2052 - protein, 16 aa, Artificial Sequence
  Description of Artificial Sequence: Zinc-alpha 2- glycoprotein peptide 7
SHLDRIDPPTVTITSR

SEQ ID NO: 2053 - protein, 10 aa, Artificial Sequence
  Description of Artificial Sequence: Zinc-alpha 2- glycoprotein peptide 8
VIPGGNRIFK

SEQ ID NO: 2054 - protein, 10 aa, Artificial Sequence
  Description of Artificial Sequence: Zinc-alpha 2- glycoprotein peptide 9
WEAEKVYVQR

SEQ ID NO: 2055 - protein, 13 aa, Artificial Sequence
  Description of Artificial Sequence: Zinc-alpha 2- glycoprotein peptide 10
YAYDGEDFIEFNK

SEQ ID NO: 2056 - protein, 23 aa, Artificial Sequence
  Description of Artificial Sequence: Synthetic peptide
  MOD_RES (23)..(23): Methionin oxidation
TEIDKPSQMQVTDVQDNSISVRM
